(19) United States
(12) Patent Application Publication
(10) Pub. No.: US 2024/0173369 A1
(43) Pub. Date: May 30, 2024

(54) PSEUDOMONAS BACTERIOPHAGE AND USES THEREOF

(71) Applicant: BIOMX LTD., Nes Ziona (IL)

(72) Inventors: Lior Moshe Zelcbuch, Herzeliya (IL); Rotem Edgar, Kfar-Saba (IL); Irit Sherman, Nes Ziona (IL); Dana Inbar, Ramat Gan (IL); Noa Ben-Yishai, Rehovot (IL); Maya Kahan-Hanum, Hod Hasharon (IL)

(21) Appl. No.: 18/283,909

(22) PCT Filed: Mar. 30, 2022
(86) PCT No.: PCT/IB2022/052916

§ 371 Date: Sep. 25, 2023

Related U.S. Application Data
(60) Provisional application No. 63/217,370, filed on Jul. 1, 2021.
(60) Provisional application No. 63/208,031, filed on Jun. 8, 2021.
(60) Provisional application No. 63/167,669, filed on Mar. 30, 2021.

(51) Int. Cl. A61K 35/76; A61K 31/427; A61K 31/7036; A61K 38/16; A61K 45/06; A61P 31/04; C12N 7/00

(52) U.S. Cl. CPC A61K 35/76; A61K 31/427; A61K 31/7036; A61K 38/164; A61K 45/06; A61P 31/04; C12N 7/00; C12N 2795/00032

(57) ABSTRACT

A composition comprising at least two different strains of isolated bacteriophages, each capable of infecting a bacteria of the species Pseudomonas aeruginosa, wherein at least one of said at least two different strains of isolated bacteriophages has a genomic nucleic acid sequence at least 90% identical to one of the nucleic acid sequence as set forth in SEQ ID NOs: 1-10. Uses thereof are also disclosed.

### REFERENCE TO RELATED APPLICATIONS

[0001] This application claims the benefit of the filing dates of U.S. Provisional Patent Application Nos. 63/167,669, filed on Mar. 30, 2021; 63/208,031, filed on Jun. 8, 2021; and 63/217,370, filed on Jul. 1, 2021, the entire contents of each of the above-referenced applications, including all drawings and sequence listings, are hereby incorporated herein by reference.

### SEQUENCE LISTING STATEMENT

[0002] The instant application contains a Sequence Listing which has been submitted electronically in ASCII format and is hereby incorporated by reference in its entirety. Said ASCII copy, created on Mar. 28, 2022, is named 136923-00120_SL.txt and is 1,178,072 bytes in size.

### FIELD AND BACKGROUND OF THE INVENTION

[0003] The present invention, in some embodiments thereof, relates to bacteriophage strains capable of infecting bacteria of the genus Pseudomonas and more particularly bacteria of the species Pseudomonas aeruginosa (PA).

[0004] Cystic fibrosis (CF) is the most common life-threatening autosomal recessive genetic disease in Caucasians. The estimated incidence of CF is one in 2500-4000 within the Caucasian population and holds a prevalence of about 100,000 globally (Orchard et al., 2014). Cystic fibrosis is a progressive, genetic disease that causes persistent lung infections and limits the ability to breathe over time. Pseudomonas aeruginosa is the key bacterial agent of cystic fibrosis (CF) lung infections, and the most important pathogen in progressive and severe CF lung disease. This opportunistic pathogen can grow and proliferate in patients, and exposure can occur in hospitals and other healthcare settings.

### SUMMARY OF THE INVENTION

[0005] Unless otherwise defined, all technical and/or scientific terms used herein have the same meaning as commonly understood by one of ordinary skill in the art to which the invention pertains. Although methods and materials similar or equivalent to those described herein can be used in the practice or testing of embodiments of the invention, exemplary methods and/or materials are described below. In case of conflict, the patent specification, including definitions, will control. In addition, the materials, methods, and examples are illustrative only and are not intended to be necessarily limiting.

[0006] According to an aspect of the present invention there is provided a composition comprising at least two different strains of isolated bacteriophages, each capable of infecting a bacteria of the species Pseudomonas aeruginosa, wherein at least one of the at least two different strains of isolated bacteriophages has a genomic nucleic acid sequence at least 90% (e.g., at least 91%, 92%, 93%, 94%, 95%, 96%, 97%, 98%, 99%, 99.2%, 99.4%, 99.6%, 99.8%, 99.9% or 100%) identical to one of the nucleic acid sequence as set forth in SEQ ID NOs: 1-10.

[0007] According to an aspect of the present invention there is provided a composition comprising at least two different strains of isolated bacteriophages, each capable of infecting a bacteria of the species Pseudomonas aeruginosa, wherein at least one of the at least two different strains of isolated bacteriophages has a genomic nucleic acid sequence comprising a combined region of homolog essential genes, at least 90% (e.g., at least 91%, 92%, 93%, 94%, 95%, 96%, 97%, 98%, 99%, 99.2%, 99.4%, 99.6%, 99.8%, 99.9% or 100%) identical to the combined coding region of the essential genes of a bacteriophage selected from the bacteriophages listed in Table 2, as set forth in Example 7.

[0008] According to an aspect of the present invention there is provided an isolated bacteriophage capable of infecting bacteria of the species Pseudomonas aeruginosa, wherein the bacteriophage has a genomic nucleic acid sequence at least 95% (e.g., at least 95%, 96%, 97%, 98%, 99%, 99.2%, 99.4%, 99.6%, 99.8%, 99.9% or 100%) identical to one of the nucleic acid sequences as set forth in SEQ ID NOs: 1-10.

[0009] According to an aspect of the present invention there is provided an isolated bacteriophage comprising at least 90% (e.g., at least 91%, 92%, 93%, 94%, 95%, 96%, 97%, 98%, 99%, 99.2%, 99.4%, 99.6%, 99.8%, 99.9% or 100%) identical genes (e.g., in the combined region) to the essential genes of a bacteriophage selected from the phages listed in Table 2, wherein the essential genes for the selected bacteriophage are as set forth in Example 7.

[0010] According to an aspect of the present invention, the non-essential genomic region of the selected phage comprises all regions that are not listed as essential genes for the selected bacteriophage as set forth in Example 7.

[0011] According to an aspect of the present invention there is provided a recombinant (non-wild-type) bacteriophage capable of (lytically) infecting a bacteria of the species Pseudomonas aeruginosa (e.g., Pseudomonas aeruginosa present in a Cystic Fibrosis patient), said recombinant bacteriophage has: (i) a genomic nucleic acid sequence comprising at least 90% (e.g., at least 91%, 92%, 93%, 94%, 95%, 96%, 97%, 98%, 99%, 99.2%, 99.4%, 99.6%, 99.8%, 99.9%, or 100%) identical (e.g., in the combined coding region) to the essential genes of a bacteriophage selected from the bacteriophages listed in Table 2, as set forth in Example 7, and/or (ii) at least 200 bp of said recombinant bacteriophage non-essential genomic region deleted or otherwise mutated (e.g., for eliminating mobile elements).

[0012] According to an aspect of the present invention there is provided a recombinant (non-wild-type) bacteriophage capable of (lytically) infecting a bacteria of the species Pseudomonas aeruginosa (e.g., Pseudomonas aeruginosa present in a Cystic Fibrosis patient), said recombinant bacteriophage has: (i) a genomic nucleic acid sequence at least 90% (e.g., at least 91%, 92%, 93%, 94%, 95%, 96%, 97%, 98%, 99%, 99.2%, 99.4%, 99.6%, 99.8%, or 99.9%) identical (e.g., in the combined coding region) to one of the nucleic acid sequence as set forth in SEQ ID NOs: 1-10, (ii) at least 90% (e.g., at least 91%, 92%, 93%, 94%, 95%, 96%, 97%, 98%, 99%, 99.2%, 99.4%, 99.6%, 99.8%, 99.9% or 100%) identical genes (e.g. in the combined region) to the essential genes of a bacteriophage selected from the bacteriophages listed in Table 2, as set forth in Example 7, and/or (iii) at least 200 bp of said recombinant bacteriophage non-essential genomic region deleted or otherwise mutated (e.g., for eliminating mobile elements).

[0013] According to an aspect of the present invention there is provided a recombinant (non-wild-type) bacteriophage capable of (lytically) infecting a bacteria of the species Pseudomonas aeruginosa (e.g., Pseudomonas aeruginosa present in a Cystic Fibrosis patient), said recombinant bacteriophage has: (i) a genomic nucleic acid sequence at least 90% (e.g., at least 91%, 92%, 93%, 94%, 95%, 96%, 97%, 98%, 99%, 99.2%, 99.4%, 99.6%, 99.8%, 99.9%, or 100%) identical in the combined coding region to one of the nucleic acid sequence as set forth in SEQ ID NOs: 1-10, (ii) at least 90% (e.g., at least 91%, 92%, 93%, 94%, 95%, 96%, 97%, 98%, 99%, 99.2%, 99.4%, 99.6%, 99.8%, 99.9% or 100%) identical genes (e.g., in the combined region) to the essential genes of a bacteriophage selected from the bacteriophages listed in Table 2, as set forth in Example 7, and/or (iii) at least 200 bp of said recombinant bacteriophage non-essential genomic region deleted or otherwise mutated (e.g., for eliminating mobile elements).

[0014] According to an aspect of the present invention there is provided a method of treating a disease associated with a Pseudomonas aeruginosa infection in a subject in need thereof, comprising administering to the subject a therapeutically effective amount of a composition comprising at least one isolated bacteriophage strain capable of infecting bacteria of the species Pseudomonas aeruginosa, wherein the at least one bacteriophage strain has (i) a genomic nucleic acid sequence at least 95% (e.g., at least 95%, 96%, 97%, 98%, 99%, 99.2%, 99.4%, 99.6%, 99.8%, 99.9% or 100%) identical to one of the nucleic acid sequences set forth in SEQ ID NOs: 1-10, and/or (ii) at least 90% (e.g., at least 91%, 92%, 93%, 94%, 95%, 96%, 97%, 98%, 99%, 99.2%, 99.4%, 99.6%, 99.8%, 99.9% or 100%) identical genes (e.g., in the combined region) to the essential genes of a bacteriophage selected from the bacteriophages listed in Table 2, as set forth in Example 7; thereby treating the disease associated with a Pseudomonas aeruginosa infection.

[0015] According to an aspect of the present invention there is provided a method of treating a disease associated with a Pseudomonas aeruginosa infection in a subject in need thereof, comprising administering to the subject a therapeutically effective amount of the composition described herein, thereby treating the disease associated with a Pseudomonas aeruginosa infection.

[0016] According to an aspect of the present invention there is provided a recombinant bacteriophage capable of infecting bacteria of the species Pseudomonas aeruginosa, wherein the bacteriophage has (i) a genomic nucleic acid sequence at least 90% (e.g., at least 91%, 92%, 93%, 94%, 95%, 96%, 97%, 98%, 99%, 99.2%, 99.4%, 99.6%, 99.8%, 99.9% or 100%) identical to one of the nucleic acid sequences as set forth in SEQ ID NOs: 1-10, and/or (ii) at least 90% (e.g., at least 91%, 92%, 93%, 94%, 95%, 96%, 97%, 98%, 99%, 99.2%, 99.4%, 99.6%, 99.8%, 99.9% or 100%) identical genes (e.g., in the combined region) to the essential genes of a bacteriophage selected from the bacteriophages listed in Table 2, as set forth in Example 7; and wherein the bacteriophage is genetically modified such that the genome thereof comprises a heterologous sequence.

[0017] According to an aspect of the present invention there is provided a pharmaceutical composition comprising the recombinant bacteriophage described herein as the active agent, and a pharmaceutical carrier.

[0018] According to an embodiment of the invention, a first of the at least two different strains of isolated bacteriophages has a genomic nucleic acid sequence at least 90% (e.g., at least 91%, 92%, 93%, 94%, 95%, 96%, 97%, 98%, 99%, 99.2%, 99.4%, 99.6%, 99.8%, 99.9% or 100%) identical to the nucleic acid sequence as set forth in SEQ ID NO: 1 (and/or comprises the essential genes of phage CF1_20Nov10 as set forth in Example 7) and a second of the at least two different strains of isolated bacteriophages has a genomic nucleic acid sequence at least 90% (e.g., at least 91%, 92%, 93%, 94%, 95%, 96%, 97%, 98%, 99%, 99.2%, 99.4%, 99.6%, 99.8%, 99.9% or 100%) identical to the nucleic acid sequence as set forth in SEQ ID NO: 2 (and/or comprises the essential genes of phage CF1_20Dec107 as set forth in Example 7).

[0019] According to an embodiment of the invention, the composition comprises at least three different strains of isolated bacteriophages, wherein a third of the at least three different strains of isolated bacteriophages has a genomic nucleic acid sequence at least 90% (e.g., at least 91%, 92%, 93%, 94%, 95%, 96%, 97%, 98%, 99%, 99.2%, 99.4%, 99.6%, 99.8%, 99.9% or 100%) identical to the nucleic acid sequence as set forth in SEQ ID NO: 3 (and/or comprises the essential genes of phage CF1_20Dec110 as set forth in Example 7).

[0020] According to an embodiment of the invention, the composition comprises a bacteriophage or a combination of bacteriophages (e.g., a combination of 2, 3, or 4 bacteriophages), selected from:
[0021] (i) a bacteriophage having a genomic nucleic acid sequence at least 90% (e.g., at least 91%, 92%, 93%, 94%, 95%, 96%, 97%, 98%, 99%, 99.2%, 99.4%, 99.6%, 99.8%, 99.9% or 100%) identical to SEQ ID NO: 1 (and/or comprises the essential genes of phage CF1_20Nov10 as set forth in Example 7);
[0022] (ii) a bacteriophage having a genomic nucleic acid sequence at least 90% (e.g., at least 91%, 92%, 93%, 94%, 95%, 96%, 97%, 98%, 99%, 99.2%, 99.4%, 99.6%, 99.8%, 99.9% or 100%) identical to SEQ ID NO: 2 (and/or comprises the essential genes of phage CF1_20Dec107 as set forth in Example 7);
[0023] (iii) a bacteriophage having a genomic nucleic acid sequence at least 90% (e.g., at least 91%, 92%, 93%, 94%, 95%, 96%, 97%, 98%, 99%, 99.2%, 99.4%, 99.6%, 99.8%, 99.9% or 100%) identical to SEQ ID NO: 3 (and/or comprises the essential genes of phage CF1_20Dec110 as set forth in Example 7); and/or
[0024] (iv) a bacteriophage having a genomic nucleic acid sequence at least 90% (e.g., at least 91%, 92%, 93%, 94%, 95%, 96%, 97%, 98%, 99%, 99.2%, 99.4%, 99.6%, 99.8%, 99.9% or 100%) identical to SEQ ID NO: 10 (and/or comprises the essential genes of phage CF1_21Oct114 as set forth in Example 7);
[0025] e.g., wherein the bacteriophage or combination of bacteriophages is capable of infecting and lysing bacteria of one or more strains of Pseudomonas aeruginosa, e.g., one or more strains of Pseudomonas aeruginosa capable of infecting a human. Optionally, at least one bacteriophage in the combination is a recombinant or engineered bacterial phage not naturally existing in nature.

[0026] In certain embodiments, the composition comprises a combination of 3 bacteriophages of (i)-(iii), such as a combination of 3 bacteriophages of (i) a bacteriophage having a genomic nucleic acid sequence of SEQ ID NO: 1 or the essential genes of phage CF1_20Nov10 as set forth in Example 7; (ii) a bacteriophage having a genomic nucleic acid sequence of SEQ ID NO: 2 or the essential genes of phage CF1_20Dec107 as set forth in Example 7; and (iii) a bacteriophage having a genomic nucleic acid sequence of SEQ ID NO: 3 or the essential genes of phage CF1_20Dec110 as set forth in Example 7.

[0027] In certain embodiments, the composition comprises a combination of 4 bacteriophages of (i)-(iv), such as a combination of 4 bacteriophages of (i) a bacteriophage having a genomic nucleic acid sequence of SEQ ID NO: 1 or the essential genes of phage CF1_20Nov10 as set forth in Example 7; (ii) a bacteriophage having a genomic nucleic acid sequence of SEQ ID NO: 2 or the essential genes of phage CF1_20Dec107 as set forth in Example 7; (iii) a bacteriophage having a genomic nucleic acid sequence of SEQ ID NO: 3 or the essential genes of phage CF1_20Dec110 as set forth in Example 7; and (iv) a bacteriophage having a genomic nucleic acid sequence of SEQ ID NO: 10 or the essential genes of phage CF1_21Oct114 as set forth in Example 7.

[0028] According to an embodiment of the invention, the at least two different strains of isolated bacteriophages in combination target at least 40, 45, 50, 55, 60 or 65 different strains of Pseudomonas aeruginosa from the list in Example 1.

[0029] According to an embodiment of the invention, the at least two different strains of isolated bacteriophages in combination target at least 25, 30, 35, 40, 45 or 50 different MLSTs of Pseudomonas aeruginosa from the list in FIG. 2.

[0030] According to an embodiment of the invention, at least 15, 17, 19, 21, 23 or 25 different strains of Pseudomonas aeruginosa from the list in Example 1 are targeted by each of the at least two different strains.

[0031] According to an embodiment of the invention, at least 9, 23, 28, 32, 35 or 36 different MLSTs of Pseudomonas aeruginosa from the list in FIG. 2 are targeted by each of the at least two different strains.

[0032] According to an embodiment of the invention, the composition comprises at least three different strains of isolated bacteriophages, each capable of infecting a bacteria of the species Pseudomonas aeruginosa, wherein each of the at least three (different strains of isolated bacteriophages has a genomic nucleic acid sequence at least 90% (e.g., at least 91%, 92%, 93%, 94%, 95%, 96%, 97%, 98%, 99%, 99.2%, 99.4%, 99.6%, 99.8%, 99.9% or 100%) identical to one of the nucleic acid sequence as set forth in SEQ ID NOs: 1-10, and/or comprises the essential genes for a bacteriophage as specified in Example 7, wherein the at least three different strains of isolated bacteriophages in combination target (i) at least 40, 45, 50, 55, 60, 65 or 70 different strains of Pseudomonas aeruginosa from the list in Example 1; and/or (ii) at least 25, 30, 35, 40, 45 or 52 different MLSTs of Pseudomonas aeruginosa from the list in FIG. 2.

[0033] According to an embodiment of the invention, the composition comprises at least three different strains of isolated bacteriophages, each capable of infecting a bacteria of the species Pseudomonas aeruginosa, wherein each of the at least three different strains of isolated bacteriophages has a genomic nucleic acid sequence at least 90% (e.g., at least 91%, 92%, 93%, 94%, 95%, 96%, 97%, 98%, 99%, 99.2%, 99.4%, 99.6%, 99.8%, 99.9% or 100%) identical to one of the nucleic acid sequence as set forth in SEQ ID Nos: 1-10, and/or comprises the essential genes for a bacteriophage as specified in Example 7, wherein (i) at least 15, 20, 25 or 30 different strains of Pseudomonas aeruginosa from the list in Example 1; and/or (ii) at least 9, 23, 28, 32, 35 or 36 different MLSTs of Pseudomonas aeruginosa from the list in FIG. 2 are targeted by each of the at least three different strains.

[0034] According to an embodiment of the invention, the at least one bacteriophage is genetically modified such that the genome thereof comprises a heterologous sequence.

[0035] According to an embodiment of the invention, the heterologous sequence encodes a therapeutic agent or a diagnostic agent.

[0036] According to an embodiment of the invention, the composition comprises no more than 10 different bacteriophage strains.

[0037] According to an embodiment of the invention, the heterologous sequence encodes a therapeutic agent or a diagnostic agent.

[0038] According to an embodiment of the invention, the therapeutic agent comprises an immune modulating agent.

[0039] According to an embodiment of the invention, the pharmaceutical composition is formulated for oral delivery or rectal delivery.

[0040] According to an embodiment of the invention, the composition is formulated for oral delivery or rectal delivery.

[0041] According to an embodiment of the invention, the disease is a Cystic Fibrosis (CF).

[0042] According to an embodiment of the invention, the administering comprises orally administering or rectally administering.

[0043] According to an embodiment of the invention, the administering comprises inhalation administering (e.g., using Meter-dosed Inhalers (MDI), Dry Powder Inhalers (DPI), Soft Mist Inhalers (SMI), Nebulizer).

[0044] According to an embodiment of the invention, the composition comprises no more than 10 different bacteriophage strains.

[0045] According to an embodiment of the invention, the method further comprises determining the strain of Pseudomonas aeruginosa colonizing the subject prior to the administering.

[0046] According to an embodiment of the invention, the at least one bacteriophage strain is genetically modified such that the genome thereof comprises a heterologous sequence.

[0047] According to an embodiment of the invention, the heterologous sequence encodes a therapeutic agent or a diagnostic agent.

[0048] According to an embodiment of the invention, the therapeutic agent comprises an immune modulating agent.

[0049] Additional aspects and embodiments of the invention described here are provided below in the numbered paragraphs.
[0050] 1. A composition comprising at least two different strains of isolated bacteriophages, each capable of (lytically) infecting a bacteria of the species Pseudomonas aeruginosa (e.g., Pseudomonas aeruginosa present in a Cystic Fibrosis patient), wherein at least one of said at least two different strains of isolated bacteriophages has (i) a genomic nucleic acid sequence at least 90% (e.g., at least 91%, 92%, 93%, 94%, 95%, 96%, 97%, 98%, 99%, 99.2%, 99.4%, 99.6%, 99.8%, 99.9% or 100%) identical (e.g., in the combined coding region) to one of the nucleic acid sequence as set forth in SEQ ID NOs: 1-10, and/or (ii) at least 90% (e.g., at least 91%, 92%, 93%, 94%, 95%, 96%, 97%, 98%, 99%, 99.2%, 99.4%, 99.6%, 99.8%, 99.9% or 100%) identical genes (e.g., in the combined region) to the essential genes of a bacteriophage selected from the bacteriophages listed in Table 2, as set forth in Example 7; and
   [0051] wherein optionally, said at least two different strains of isolated bacteriophages have synergistic redundancy effect, based on either (i) time-to-mutant (TTM) that is at least 10%, 20%, 30%, 40%, 50%, 60%, 70%, or 80% above the longest individual phage TTM with respect to said bacteria, or (ii) normalized area under the curve for OD600-time plot (AUC) that is at least 10%, 20%, 30%, 40%, 50%, 60%, 70%, 80% or 90% smaller than the smallest individual phage normalized area under the curve with respect to said bacteria (or a mixture of more than one of said bacteria).
[0052] 2. The composition of paragraph 1, wherein a first of said at least two different strains of isolated bacteriophages has a genomic nucleic acid sequence at least 90% (e.g., at least 91%, 92%, 93%, 94%, 95%, 96%, 97%, 98%, 99%, 99.2%, 99.4%, 99.6%, 99.8%, 99.9% or 100%) identical (e.g., in the combined coding region) to the nucleic acid sequence as set forth in SEQ ID NO: 1 and a second of said at least two different strains of isolated bacteriophages has a genomic nucleic acid sequence at least 90% (e.g., at least 91%, 92%, 93%, 94%, 95%, 96%, 97%, 98%, 99%, 99.2%, 99.4%, 99.6%, 99.8%, 99.9% or 100%) identical (e.g., in the combined coding region) to the nucleic acid sequence as set forth in SEQ ID NO: 2.
[0053] 3. The composition of paragraph 2, comprising at least three different strains of isolated bacteriophages, wherein a third of said at least three different strains of isolated bacteriophages has a genomic nucleic acid sequence at least 90% (e.g., at least 91%, 92%, 93%, 94%, 95%, 96%, 97%, 98%, 99%, 99.2%, 99.4%, 99.6%, 99.8%, 99.9% or 100%) identical (e.g., in the combined coding region) to the nucleic acid sequence as set forth in SEQ ID NO: 3.
[0054] 4. The composition of paragraph 1 or 2, comprising:
   [0055] (i) a bacteriophage having a genomic nucleic acid sequence at least 90% (e.g., at least 91%, 92%, 93%, 94%, 95%, 96%, 97%, 98%, 99%, 99.2%, 99.4%, 99.6%, 99.8%, 99.9% or 100%) identical (e.g., in the combined coding region) to SEQ ID NO: 1;
   [0056] (ii) a bacteriophage having a genomic nucleic acid sequence at least 90% (e.g., at least 91%, 92%, 93%, 94%, 95%, 96%, 97%, 98%, 99%, 99.2%, 99.4%, 99.6%, 99.8%, 99.9% or 100%) identical (e.g., in the combined coding region) to SEQ ID NO: 2;
   [0057] (iii) a bacteriophage having a genomic nucleic acid sequence at least 90% (e.g., at least 91%, 92%, 93%, 94%, 95%, 96%, 97%, 98%, 99%, 99.2%, 99.4%, 99.6%, 99.8%, 99.9% or 100%) identical (e.g., in the combined coding region) to SEQ ID NO: 3;
   [0058] (iv) a bacteriophage having a genomic nucleic acid sequence at least 90% (e.g., at least 91%, 92%, 93%, 94%, 95%, 96%, 97%, 98%, 99%, 99.2%, 99.4%, 99.6%, 99.8%, 99.9% or 100%) identical (e.g., in the combined coding region) to SEQ ID NO: 4.
[0059] 5. The composition of paragraph 1, wherein said at least two different strains of isolated bacteriophages in combination target at least 40, 45, 50, 55, 60 or 65 different strains of Pseudomonas aeruginosa from the list in Example 1 of Pseudomonas aeruginosa.
[0060] 6. The composition of paragraph 1 or 5, wherein at least 25 different strains of Pseudomonas aeruginosa from the list in Example 1 and/or at least 36 different MLSTs of Pseudomonas aeruginosa from the list in FIG. 2 are targeted by each of said at least two different strains.
[0061] 7. The composition of paragraph 1, 5, or 6, comprising at least three different strains of isolated bacteriophages, each capable of infecting a bacteria of the species Pseudomonas aeruginosa, wherein each of said at least three different strains of isolated bacteriophages has a genomic nucleic acid sequence at least 90% (e.g., at least 91%, 92%, 93%, 94%, 95%, 96%, 97%, 98%, 99%, 99.2%, 99.4%, 99.6%, 99.8%, 99.9% or 100%) identical (e.g., in the combined coding region) to one of the nucleic acid sequence as set forth in SEQ ID NOs: 1-10, wherein said at least three different strains of isolated bacteriophages in combination target (i) at least 70 different strains of Pseudomonas aeruginosa from the list in Example 1; and/or (ii) at least 52 different MLSTs of Pseudomonas aeruginosa from the list in FIG. 2.
[0062] 8. The composition of paragraph 1, 5, 6, or 7, comprising at least three different strains of isolated bacteriophages, each capable of infecting a bacteria of the species Pseudomonas aeruginosa, wherein each of said at least three different strains of isolated bacteriophages has a genomic nucleic acid sequence at least 90% (e.g., at least 91%, 92%, 93%, 94%, 95%, 96%, 97%, 98%, 99%, 99.2%, 99.4%, 99.6%, 99.8%, 99.9% or 100%) identical (e.g., in the combined coding region) to one of the nucleic acid sequence as set forth in SEQ ID NOs: 1-10, wherein (i) at least 40 different strains of Pseudomonas aeruginosa from the list in Example 1, and/or (ii) at least 52 different MLSTs of Pseudomonas aeruginosa from the list in FIG. 2 are targeted by at least two of said at least three different strains.
[0063] 9. The composition of any one of paragraphs 1-8, wherein said at least one bacteriophage is genetically modified such that the genome thereof comprises a heterologous sequence.
[0064] 10. The composition of paragraph 9, wherein said heterologous sequence encodes a therapeutic agent or a diagnostic agent.
[0065] 11. The composition of any one of paragraphs 1-10, comprising no more than 10 different bacteriophage strains.
[0066] 12. The composition of any one of paragraphs 1-11, being formulated for oral delivery, rectal delivery or delivery by inhalation.
[0067] 13. A recombinant bacteriophage capable of infecting bacteria of the species Pseudomonas aeruginosa, wherein said bacteriophage has a genomic nucleic acid sequence at least 90% (e.g., at least 91%, 92%, 93%, 94%, 95%, 96%, 97%, 98%, 99%, 99.2%, 99.4%, 99.6%, 99.8%, 99.9% or 100%) identical (e.g., in the combined coding region) to one of the nucleic acid sequences as set forth in SEQ ID NOs: 1-10, and wherein said bacteriophage is genetically modified such that the genome thereof comprises a heterologous sequence.
[0068] 14. The recombinant bacteriophage of paragraph 13, wherein said heterologous sequence encodes a therapeutic agent or a diagnostic agent.
[0069] 15. The recombinant bacteriophage of paragraph 14, or the composition of paragraph 10, wherein said therapeutic agent comprises an immune modulating agent.
[0070] 16. A pharmaceutical composition comprising the recombinant bacteriophage of paragraph 13 or 14 as the active agent, and a pharmaceutical carrier.
[0071] 17. The pharmaceutical composition of paragraph 16, being formulated for oral delivery, rectal delivery or delivery by inhalation.
[0072] 18. An isolated bacteriophage capable of (lytically) infecting bacteria of the species Pseudomonas aeruginosa (e.g., Pseudomonas aeruginosa present in a Cystic Fibrosis patient), wherein said bacteriophage has a genomic nucleic acid sequence at least 95% (e.g., at least 95%, 96%, 97%, 98%, 99%, 99.2%, 99.4%, 99.6%, 99.8%, 99.9% or 100%) identical (e.g., in the combined coding region) to one of the nucleic acid sequences as set forth in SEQ ID NOs: 1-10.
[0073] 19. A method of treating a disease associated with a Pseudomonas aeruginosa infection in a subject in need thereof (e.g., a subject having Cystic Fibrosis), comprising administering to the subject a therapeutically effective amount of a composition comprising at least one isolated bacteriophage strain capable of infecting bacteria of the species Pseudomonas aeruginosa causing the infection, wherein said at least one bacteriophage strain has a genomic nucleic acid sequence at least 95% (e.g., at least 95%, 96%, 97%, 98%, 99%, 99.2%, 99.4%, 99.6%, 99.8%, 99.9% or 100%) identical (e.g., in the combined coding region) to one of the nucleic acid sequences set forth in SEQ ID NOs: 1-10, thereby treating the disease associated with a Pseudomonas aeruginosa infection.
[0074] 20. A method of treating a disease (e.g., Cystic Fibrosis) associated with a Pseudomonas aeruginosa infection in a subject in need thereof, comprising administering to the subject a therapeutically effective amount of the composition of any one of paragraphs 1-12, thereby treating the disease associated with a Pseudomonas aeruginosa infection.
[0075] 21. The method of paragraph 19 or 20, wherein the disease is Cystic Fibrosis (CF).
[0076] 22. The method of any one of paragraphs 19-21, wherein said administering comprises orally administering or rectally administering.
[0077] 23. The method of paragraph 19, wherein said composition comprises no more than 10 different bacteriophage strains.
[0078] 24. The method of any one of paragraphs 19-23, further comprising identifying the strain of Pseudomonas aeruginosa colonizing the subject prior to the administering.
[0079] 25. The method of any one of paragraphs 19-24, wherein said at least one bacteriophage strain is genetically modified such that the genome thereof comprises a heterologous sequence.
[0080] 26. The method of paragraph 25, wherein said heterologous sequence encodes a therapeutic agent or a diagnostic agent.
[0081] 27. The method of paragraph 26, wherein said therapeutic agent comprises an immune modulating agent.
[0082] 28. The method of any one of paragraphs 19-27, wherein the subject has been treated with, or is to be further treated with an antibiotic effective against Pseudomonas aeruginosa (e.g., Pseudomonas aeruginosa present in a Cystic Fibrosis patient).
[0083] 29. The method of any one of paragraphs 19-27, further comprising treating the subject with an antibiotic effective against Pseudomonas aeruginosa (e.g., Pseudomonas aeruginosa present in a Cystic Fibrosis patient).
[0084] 30. The method of paragraph 28 or 29, wherein the antibiotic comprises aztreonam, colistin, and/or tobramycin.

[0085] It should be understood that any one embodiment of the invention described herein, including those described only in the examples or claims, or numbered paragraphs herein, can be combined with any one or more additional embodiments of the invention, unless such combination is improper or expressly disclaimed.

### BRIEF DESCRIPTION OF THE SEVERAL VIEWS OF THE DRAWINGS

[0086] Some embodiments of the invention are herein described, by way of example only, with reference to the accompanying drawings. With specific reference now to the drawings in detail, it is stressed that the particulars shown are by way of example and for purposes of illustrative discussion of embodiments of the invention. In this regard, the description taken with the drawings makes apparent to those skilled in the art how embodiments of the invention may be practiced.

[0087] In the drawings:

[0088] FIG. 1 is a distance matrix summarizing the % sequence homology (based on local BLAST) among the isolated phages.

[0089] FIG. 2 presents the host range of the isolated phages as profiled according to the hosts bacteria multilocus sequence typing (MLST). An MLST instance where at least on bacterial member was found to be infected by the corresponding phage was marked “+.”

[0090] FIGS. 3A to 3J present growth curves of in vitro liquid infection of Pseudomonas aeruginosa strains with individual bacteriophage or cocktail, with different antibiotic or with both bacteriophage and antibiotic.

[0091] FIGS. 4A and 4B present the results of two assays used for assessing the phage effect on Pseudomonas aeruginosa biofilm and the Pseudomonas aeruginosa bacteria embedded within. FIG. 4A is an image of biofilm stained with crystal violet, after treatment with phage cocktail (right) and without it (left). FIG. 4B presents the count of bacteria embedded in the biofilm after treatment with a phage cocktail (right column), antibiotics (middle column) or non (left column).

[0092] FIGS. 5A-5G present the synergistic performance of phage mixtures in comparison to the TTM observed for each phage member separately.

### DESCRIPTION OF SPECIFIC EMBODIMENTS OF THE INVENTION

[0093] The present invention, in some embodiments thereof, relates to bacteriophage strains capable of infecting bacteria of the genus Pseudomonas and more particularly bacteria of the species Pseudomonas aeruginosa.

[0094] Before explaining at least one embodiment of the invention in detail, it is to be understood that the invention is not necessarily limited in its application to the details set forth in the following description or exemplified by the Examples. The invention is capable of other embodiments or of being practiced or carried out in various ways.

[0095] The present inventors have isolated novel bacteriophage strains characterized by having a high specificity to one or more Pseudomonas aeruginosa strains. The disclosed bacteriophage are lytic, and as such do not have any capacity to integrate into the DNA of their bacterial host. Such bacteriophages bring about immediate target bacterial eradication through lysis after hijacking the host protein expression machinery to manufacture needed phage protein components.

[0096] The present inventors sought to combine particular phage strains and provide them as a cocktail which is capable of lysing a myriad of Pseudomonas aeruginosa strains in a single dose. The cocktails can serve as an off-the-shelf therapeutic for the treatment of Cystic fibrosis (CF), which is known to be associated with Pseudomonas aeruginosa infections. Furthermore, it is envisaged that the cocktails will have high therapeutic efficacy for treating CF at the individual level, since each individual can be infected by a wide range of Pseudomonas aeruginosa strains.

[0097] The combinations disclosed herein are typically synergistic (e.g., synergistic combination) with respect to their inhibitory effect on the target bacteria. This may be quantitated by measuring the time taken to mutation (TTM), i.e., the time taken for a bacteria to mutate and overcome the inhibitory effect of a phage. When two phages X and Y are known to infect a target bacteria strain H, the TTM of each phage separately as well as the TTM of their combination is measured under same growth conditions. The synergistic redundancy effect appears when the TTM of combination [X,Y] is longer than that of both X and Y.

[0098] In certain embodiments, the at least two different strains of isolated bacteriophages have synergistic redundancy effect, based on time-to-mutant (TTM) that is at least 10%, 20%, 30%, 40%, 50%, 60%, 70%, or 80% above the longest individual phage TTM with respect to the bacteria using which the TTM is measured.

[0099] Alternatively, or in addition, in certain embodiments, the at least two different strains of isolated bacteriophages have synergistic redundancy effect, based on normalized area under the curve for OD600-time plot (AUC) that is at least 10%, 20%, 30%, 40%, 50%, 60%, 70%, 80% or 90% smaller than the smallest individual phage normalized area under the curve with respect to said bacteria (or a mixture of more than one of said bacteria).

[0100] Here, when bacteria growth in the presence of a bacteriophage (or combination thereof) is plotted as OD600 over time, an area under the curve can be calculated for each phage (or combination thereof). Such AUC, when normalized against no phage control AUC, can be compared to assess synergistic suppression of bacteria growth by phage combinations as compared to individual phages in the combination.

[0101] Without being bound to theory, the synergy may be derived from different mechanism of infection used by the two phages X and Y. According to certain embodiments of the present invention, the synergic TTM increase may be predicted by the “at least 2 phage % coverage,” and/or the “at least 3 phage % coverage,” and/or the “at least 4 phage % coverage,” and/or the “at least 5 phage % coverage” trait of a phage combination.

[0102] Thus, according to a first aspect of the present invention, there is provided an isolated bacteriophage capable of infecting bacteria of the species Pseudomonas aeruginosa, wherein the bacteriophage has a genomic nucleic acid sequence at least 95% identical to one of the nucleic acid sequences as set forth in SEQ ID NOs: 1-10. Optionally, the bacteriophage is not naturally existing and comprises at least one heterologous engineered mutation.

[0103] As used herein, the term “bacteriophage” and “phage” are used interchangeably and refer to an isolated virus that is capable of infecting a bacterium. Typically, a phage will be characterized by: 1) the nature of the nucleic acids that make up its genome, e.g., DNA, RNA, single-stranded or double-stranded; 2) the nature of its infectivity, e.g., lytic or temperate; and 3) the particular Pseudomonas aeruginosa subspecies that it infects (and in certain instances the particular strain of that Pseudomonas aeruginosa subspecies). This aspect is known as “host range.”

[0104] As used herein, the phrases “isolated bacteriophage,” “isolate” or grammatical equivalents refer to a bacteriophage which is removed from its natural environment (e.g. removed from bacteria which it typically infects). In one embodiment, the isolated bacteriophage is removed from cellular material and/or other elements that naturally exist in the source clinical or environmental sample. The term isolated bacteriophages includes such phages isolated from human or animal patients (“clinical isolates” or “clinical variants”) and such phages isolated from the environment (“environmental isolates”).

[0105] In one embodiment, the bacteriophages are lytic.

[0106] The term “lytic bacteriophage” refers to a bacteriophage that infects a bacterial host and causes that host to lyse without incorporating the phage nucleic acids into the host genome. A lytic bacteriophage is typically not capable of reproducing using the lysogenic cycle.

[0107] As used herein, the phrase “phage strain” refers to the deposited or sequenced phage, as described herein.

[0108] The bacteriophage have been deposited at the Polish Collection of microorganisms PCM), Institute of Immunology and Experimental Therapy, Polish Academy of Sciences, U1. Weigla 12, 53-114 Wroclaw, Poland with the deposit numbers provided in Table 2.1, herein below.

[0109] The term “Pseudomonas aeruginosa” relates to a species of bacteria of the Pseudomonas genus. Pseudomonas bacterium are gram-negative, rod-shaped with unipolar motility. It will be appreciated that the term “Pseudomonas aeruginosa” includes bacteria that are currently classified or will be reclassified as Pseudomonas aeruginosa bacteria.

[0110] Exemplary strains of Pseudomonas aeruginosa that are infected by the phage strains of the present invention are those that are found in human specimens (e.g., the airway, urinary tract, burns, and wounds).

[0111] In some embodiments, the bacteriophages provided herein are capable of lysing deleterious Pseudomonas aeruginosa bacteria that induce immune and/or inflammatory response(s) and linked to progressive pulmonary function decline in CF patients among others.

[0112] In a particular embodiment, the phages described herein are capable of infecting at least one, two, three, four, five, six, seven, eight, nine or more Pseudomonas aeruginosa strains (e.g. from the list in Example 1) that infect a subject (e.g. CF patient) and/or at least one, two, three, four, five, six, seven, eight, nine or more MLSTs of Pseudomonas aeruginosa from the list in FIG. 2.

[0113] In a particular embodiment, the phages described herein are capable of infecting at least one, two, three, four, five, six, seven, eight, nine or more Pseudomonas aeruginosa strains (e.g. from the list in Example 1) and/or at least one, two, three, four, five, six, seven, eight, nine or more MLSTs of Pseudomonas aeruginosa from the list in FIG. 2 present in the subject (e.g., in the airway, urinary tract, burns, and wounds).

[0114] In a particular embodiment, the phages described herein are capable of infecting at least one, two, three, four, five, six, seven, eight, nine or more Pseudomonas aeruginosa strains (e.g., from the list in Example 1) and/or at least one, two, three, four, five, six, seven, eight, nine or more MLSTs of Pseudomonas aeruginosa from the list in FIG. 2 infecting subjects such as CF patients.

[0115] Pseudomonas spp. code for an extracellular capsule that is highly variable within the species. This capsule is a high molecular weight polysaccharide made up of different repeat units of oligosaccharides. Combinations of different oligosaccharides are referred to as serotypes. In Pseudomonas, there are over 20 serologically defined serotypes.

[0116] According to a particular embodiment, the phages described herein are capable of infecting Pseudomonas aeruginosa bacterial strains having a specific capsule locus type.

[0117] Also contemplated are progeny of the phages having a genomic nucleic acid as set forth in SEQ ID NOs: 1-10, wherein the progeny is capable of infecting the same subspecies (or even strain) of Pseudomonas aeruginosa as that the parent bacteriophage having one of the above set forth genomic nucleic acid sequence infects. Such progeny may have genomes having a sequence at least 85% identical, at least 90% identical, at least 91% identical, at least 92% identical, at least 93% identical, at least 94% identical, at least 95% identical, 96% identical, 97% identical 98% identical, or 99% identical to the genome of the parent bacteriophage.

[0118] As used herein, the term “or progeny of the bacteriophage” refers to bacteriophages stemming from or derived from the strains identified herein.

[0119] Also contemplated are functional homologs of those that have a genomic nucleic acid sequence as set forth in SEQ ID NOs: 1-10, wherein the functionally homologous bacteriophage is capable of infecting essentially the same subspecies (or even strain) of Pseudomonas aeruginosa as that which the bacteriophage having one of the above set forth genomic nucleic acid sequence infects.

[0120] As used herein “functional homolog” or “functionally homologous” or “variant” or grammatical equivalents as used herein refer to a bacteriophage with a genomic nucleic acid sequence different than that of the sequenced bacteriophage (i.e., at least one mutation) resulting in a bacteriophage that is endowed with substantially the same ensemble of biological activities (+/−10%, 20%, 40%, 50%, 60% when tested under the same conditions) as that of the sequenced bacteriophage and can be classified as infecting essentially the same strain or subspecies of bacteria based on known methods of species/strain classifications.

[0121] A bacteriophage “infects” bacteria if it either causes the bacteria to lyse or integrates its nucleic acid sequence into the bacterial genome.

[0122] According to a particular embodiment, the bacteriophage disclosed herein lyse their target bacteria.

[0123] According to a particular embodiment, the bacteriophage capability to infect (also termed “to target”) their target bacteria is measured using a solid assay or a liquid assay.

[0124] According to some embodiments, the genomic nucleic acid sequence of the bacteriophages described herein is at least about 85%, at least about 90%, at least about 91%, at least about 92%, at least about 93%, at least about 94%, at least about 95%, at least about 96% least about 97%, at least about 97.1%, at least about 97.2%, at least about 97.3%, at least about 97.4%, at least about 97.5%, at least about 97.6%, at least about 97.7%, at least about 97.8%, at least about 97.9%, at least about 98%, at least about 98.1%, at least about 98.2%, at least about 98.3%, at least about 98.4%, at least about 98.5%, at least about 98.6%, at least about 98.7%, at least about 98.8%, at least about 98.9%, at least about 99%, at least about 99.1%, at least about 99.2%, at least about 99.3%, at least about 99.4%, at least about 99.5%, at least about 99.6%, at least about 99.7%, at least about 99.8%, at least about 99.8%, at least about 99.9%, at least about 99.95% 99.95%, at least about 99.99%, or more identical to the (i) genomic sequence of the genomic sequences as set forth in SEQ ID NOs: 1, 2, 3, 4, 5, 6, 7, 8, 9 or 10; and/or (ii) combined region of the essential genes of a bacteriophage selected from the bacteriophages listed in Table 2, as set forth in Example 7.

[0125] In particular, the bacteriophage has a genomic nucleic acid sequence at least 95% identical (% homologous) to the nucleic acid sequence as set forth in SEQ ID NOs: 1, 2, 3, 4, 5, 6, 7, 8, 9 or 10; and/or (ii) combined region of the essential genes of a bacteriophage selected from the bacteriophages listed in Table 2, as set forth in Example 7.

[0126] According to a specific embodiment, the bacteriophage has a genomic nucleic acid sequence at least 95% identical (% homologous) to the full length nucleic acid sequence as set forth in SEQ ID NOs: 1, 2, 3, 4, 5, 6, 7, 8, 9 or 10.

[0127] According to a specific embodiment, the bacteriophage comprises at least 90% (e.g., at least 91%, 92%, 93%, 94%, 95%, 96%, 97%, 98%, 99%, 99.2%, 99.4%, 99.6%, 99.8%, 99.9% or 100%) identical genes (e.g., in the combined region) to the essential genes of a bacteriophage selected from the bacteriophages listed in Table 2, wherein the essential genes are genes as set forth for the selected bacteriophage in Example 7.

[0128] As used herein, “percent homology,” “percent identity,” “sequence identity” or “identity” or grammatical equivalents as used herein in the context of two nucleic acid or polypeptide sequences includes reference to the residues in the two sequences which are the same when aligned. When percentage of sequence identity is used in reference to proteins it is recognized that residue positions which are not identical often differ by conservative amino acid substitutions, where amino acid residues are substituted for other amino acid residues with similar chemical properties (e.g. charge or hydrophobicity) and therefore do not change the functional properties of the molecule. Where sequences differ in conservative substitutions, the percent sequence identity may be adjusted upwards to correct for the conservative nature of the substitution. Sequences which differ by such conservative substitutions are considered to have “sequence similarity” or “similarity.” Means for making this adjustment are well-known to those of skill in the art. Typically this involves scoring a conservative substitution as a partial rather than a full mismatch, thereby increasing the percentage sequence identity. Thus, for example, where an identical amino acid is given a score of 1 and a non-conservative substitution is given a score of zero, a conservative substitution is given a score between zero and 1. The scoring of conservative substitutions is calculated, e.g., according to the algorithm of Henikoff S and Henikoff J G. [Amino acid substitution matrices from protein blocks. Proc. Natl. Acad. Sci. U.S.A. 1992, 89(22): 10915-9].

[0129] Percent identity can be determined using any homology comparison software, including for example, the BlastN software of the National Center of Biotechnology Information (NCBI) such as by using default parameters.

[0130] Other exemplary sequence alignment programs that may be used to determine % homology or identity between two sequences include, but are not limited to, the FASTA package (including rigorous (SSEARCH, LALIGN, GGSEARCH and GLSEARCH) and heuristic (FASTA, FASTX/Y, TFASTX/Y and FASTS/M/F) algorithms, the EMBOSS package (Needle, stretcher, water and matcher), the BLAST programs (including, but not limited to BLASTN, BLASTX, TBLASTX, BLASTP, TBLASTN), megablast and BLAT. In some embodiments, the sequence alignment program is BLASTN. For example, 95% homology refers to 95% sequence identity determined by BLASTN, by combining all non-overlapping alignment segments (BLAST HSPs), summing their numbers of identical matches and dividing this sum with the length of the shorter sequence.

[0131] In some embodiments, the sequence alignment program is a basic local alignment program, e.g., BLAST. In some embodiments, the sequence alignment program is a pairwise global alignment program. In some embodiments, the pairwise global alignment program is used for protein-protein alignments. In some embodiments, the pairwise global alignment program is Needle. In some embodiments, the sequence alignment program is a multiple alignment program. In some embodiments, the multiple alignment program is MAFFT. In some embodiments, the sequence alignment program is a whole genome alignment program. In some embodiments, the whole genome alignment is performed using BLASTN. In some embodiments, BLASTN is utilized without any changes to the default parameters.

[0132] According to some embodiments of the invention, the identity is a global identity, i.e., an identity over the entire nucleic acid sequences of the invention and not over portions thereof.

[0133] According to an additional or alternative embodiment, a functional homolog is determined as the average nucleotide identity (ANI), which detects the DNA conservation of the core genome (Konstantinidis K and Tiedje J M, 2005, Proc. Natl. Acad. Sci. USA 102: 2567-2592). In some embodiments, the ANI between the functional homolog and the deposited bacteriophage (or that having a genome as set forth in any one of SEQ ID NO: 1, 2, 3, 4, 5, 6, 7, 8, 9 or 10 is of at least about 95%, at least about, 96%, at least about 97%, at least about 98%, at least about 99%, at least about 99.1%, at least about 99.5%, at least about 99.6%, at least about 99.7%, at least about 99.8%, at least about 99.9% or more.

[0134] According to an additional or alternative embodiment, a functional homolog is determined by the degree of relatedness between the functional homolog and the bacteriophage having a genome as set forth in any one of SEQ ID NO: 1, 2, 3, 4, 5, 6, 7, 8, 9 or 10 determined as the Tetranucleotide Signature Frequency Correlation Coefficient, which is based on oligonucleotide frequencies (Bohlin J. et al. 2008, BMC Genomics, 9:104). In some embodiments, the Tetranucleotide Signature Frequency Correlation coefficient between the variant and the bacteriophage having a genome as set forth in any one of SEQ ID NO: 1, 2, 3, 4, 5, 6, 7, 8, 9 or 10 is of about 0.99, 0.999 or more.

[0135] According to an additional or alternative embodiment, the degree of relatedness between the functional homolog and the bacteriophage having a genome as set forth in any one of SEQ ID NO: 1, 2, 3, 4, 5, 6, 7, 8, 9 or 10 is determined as the degree of similarity obtained when analyzing the genomes of the parent and of the variant bacteriophage by Pulsed-field gel electrophoresis (PFGE) using one or more restriction endonucleases. The degree of similarity obtained by PFGE can be measured by the Dice similarity coefficient. In some embodiments, the Dice similarity coefficient between the variant and the bacteriophage having a genome as set forth in any one of SEQ ID NO: 1, 2, 3, 4, 5, 6, 7, 8, 9 or 10 is of at least about 96%, at least about 97%, at least about 98%, at least about 99%, at least about 99.1%, at least about 99.5%, at least about 99.6%, at least about 99.7%, at least about 99.8%, at least about 99.9% or more.

[0136] According to an additional or alternative embodiment, the degree of relatedness between the functional homolog and the bacteriophage having a genome as set forth in any one of SEQ ID NO: 1, 2, 3, 4, 5, 6, 7, 8, 9 or 10 is determined by the Pearson correlation coefficient obtained by comparing the genetic profiles of both phages obtained by repetitive extragenic palindromic element-based PCR (REP-PCR) (see e.g. Chou and Wang, Int J Food Microbiol. 2006, 110:135-48). In some embodiments, the Pearson correlation coefficient obtained by comparing the REP-PCR profiles of the variant and the above described (e.g. deposited phage) is of at least about 0.99, at least about 0.999 or more—see for example bmcmicrobioldotbiomedcentraldotcom/articles/10.1186/s12866-020-01770-2.

[0137] According to an additional or alternative embodiment, the degree of relatedness between the functional homolog and the bacteriophage having a genome as set forth in any one of SEQ ID NO: 1, 2, 3, 4, 5, 6, 7, 8, 9 or 10 is defined by the linkage distance obtained by comparing the genetic profiles of both phages obtained by Multi-locus sequence typing (MLST) (see e.g. Maiden, M. C., 1998, Proc. Natl. Acad. Sci. USA 95:3140-3145). In some embodiments, the linkage distance obtained by MLST of the functional homolog and the phage having a genome as set forth in any one of SEQ ID NO: 1, 2, 3, 4, 5, 6, 7, 8, 9 or 10 is of at least about 0.99, at least about 0.999 or more.

[0138] According to an additional or alternative embodiment, the functional homolog comprises a functionally conserved gene or a fragment thereof (i.e. an essential gene) e.g., an integrase gene, a polymerase gene, a capsid protein assembly gene, a DNA terminase, a tail fiber gene, or a repressor gene that is at least about 97%, at least about 98%, at least about 99%, at least about 99.1%, at least about 99.5%, at least about 99.6%, at least about 99.7%, at least about 99.8%, at least about 99.9%, or more identical to that of the bacteriophage having a genome as set forth in any one of SEQ ID NO: 1, 2, 3, 4, 5, 6, 7, 8, 9 or 10.

[0139] For each of the disclosed bacteriophages, Example 7 provides the gene name of their essential genes.

[0140] According to an additional or alternative embodiment, the functional homolog is defined by a comparison of the coding sequence (gene) order.

[0141] According to an additional or alternative embodiment, the functional homolog is defined by a comparison of the coding sequence (gene) order of the essential genes of a bacteriophage selected from the bacteriophages listed in Table 2, as set forth in Example 7.

[0142] According to an additional or alternative embodiment, the functional homolog is defined by a comparison of order of non-coding sequences.

[0143] According to an additional or alternative embodiment, the functional homolog is defined by a comparison of order of coding and non-coding sequences.

[0144] According to some embodiments of the invention, the combined coding region of the functional homolog is such that it maintains the original order of the coding regions as within the genomic sequence of the bacteriophage having a genome as set forth in any one of SEQ ID NO: 1, 2, 3, 4, 5, 6, 7, 8, 9 or 10, yet without the non-coding regions.

[0145] For example, in case the genomic sequence has the following coding regions, A, B, C, D, E, F, G, each flanked by non-coding sequences (e.g., regulatory elements, and the like), the combined coding region will include a single nucleic acid sequence having the A+B+C+D+E+F+G coding regions combined together while maintaining the original order of their genome, yet without the non-coding sequences.

[0146] According to some embodiments of the invention, the combined non-coding region of the functional homolog is such that it maintains the original order of the non-coding regions as within the genomic sequence of the bacteriophage having a genome as set forth in any one of SEQ ID NO: 1, 2, 3, 4, 5, 6, 7, 8, 9 or 10, yet without the coding regions as originally present in the original bacteriophage.

[0147] According to some embodiments of the invention, the combined non-coding region and coding region (i.e., the genome) of the functional homolog is such that it maintains the original order of the coding and non-coding regions as within the genomic sequence of the bacteriophage having a genome as set forth in any one of SEQ ID NO: 1, 2, 3, 4, 5, 6, 7, 8, 9 or 10.

[0148] As used herein “maintains” relate to at least about 90%, 91%, 92%, 93%, 94%, 95%, 96%, 97%, 98%, 99% or 100% of the coding and/or non-coding regions of the functional homolog compared to the bacteriophage having a genome as set forth in any one of SEQ ID NO: 1, 2, 3, 4, 5, 6, 7, 8, 9 or 10.

[0149] According to an additional or alternative embodiment, the functional homolog is defined by a comparison of gene content.

[0150] According to a specific embodiment, the functional homolog comprises a combined coding region at least about 90%, at least about 91%, at least about 92%, at least about 93%, at least about 94%, at least about 95%, at least about 96%, at least about 97%, at least about 98%, at least about 99%, or more (e.g., 100%) identical to the combined coding region existing in genome of the bacteriophage having a genome as set forth in any one of SEQ ID NO: 1, 2, 3, 4, 5, 6, 7, 8, 9 or 10.

[0151] As used herein “combined coding region” refers to a nucleic acid sequence including all of the coding regions of the original bacteriophage yet without the non-coding regions of the original bacteriophage.

[0152] In one embodiment, the bacteriophages show up to 85%, 86%, 87%, 88%, 89%, 90%, 91%, 92%, 93%, 94%, 95%, 96%, 97%, 98%, 99% sequence identity with the bacteriophages disclosed herein and share at least one of the following characteristics—similar host range; similar type of infectivity (i.e. lytic or temperate).

[0153] In another embodiment, the bacteriophages show up to 85%, 86%, 87%, 88%, 89%, 90%, 91%, 92%, 93%, 94%, 95%, 96%, 97%, 98%, 99% sequence identity with the bacteriophages disclosed herein and share both of the following characteristics—similar host range; similar type of infectivity.

[0154] Additional bioinformatics methods that may be used to determine relatedness between two phage genomes include Nucmer and Minimap, both of which are alignment based tools; Win-zip, Jacard distance and MinHash, each of which are information based tools; and Codon usage similarity, pathway similarity and protein motif similarity.

[0155] As used herein, “host range” refers to the bacteria that are susceptible to infection by a particular phage. The host range of a phage may include, but is not limited to, a strain, a subspecies, a species, a genus, or multiple genera of bacteria.

[0156] Phage isolates may be prepared and phenotyped using methods known in the art, e.g., a plaque assay, liquid media assay, solid media assay. In some embodiments, the solid media assays to quantify and isolate phage are based on plaque assays (S. T. Abedon et al., Methods in Molecular Biology 2009 (Clifton, N.J.), 501, 161-74), ranging from efficiency of plating (EOP) (E. Kutter, Methods in Molecular Biology 2009 (Clifton, N.J.), 501, 141-9) to spot testing (P. Hyman et al., Advances in Applied Microbiology (1st ed., Vol. 70, pp. 217-48) 2010. Elsevier Inc.). In some embodiments, the plate format used for the plaque assay can be modified, e.g., from a petri dish to a 48-well plate.

[0157] In some embodiments, a double-layer plaque assay is used to phenotype bacteriophage isolates. For example, a starter culture of 4 mL BHIS may be inoculated with 50-100 colonies from a plate. This culture may be incubated at 37° C. for 16 hours in an anaerobic environment. A volume of 200 μL of this culture may be mixed with 100 μL of a phage-containing sample (or medium only control) and incubated for 15 minutes. 5 mL of BHIS top agar (pre-molten 0.4% agar BHIS supplemented with 1 mM Ca²⁺, Mn²⁺ and Mg²⁺ ions may be added), and the mixture may be poured over a BHIS bottom agar plate (1.5% agar BHIS). The plates may be allowed to gel at room temperature, and then incubated for 16 hours at 37° C. in anaerobic environment until plaques are identified.

[0158] In some embodiments, a modified spot drop assay is used to phenotype bacteriophage isolates. For example, a starter culture of 4 mL BHIS may be inoculated with 50-100 colonies from a plate. This culture may be incubated at 37° C. for 16 hours in an anaerobic environment. A volume of 200 μL of this culture may be mixed with 5 mL of BHIS top agar (pre-molten 0.4% agar BHIS supplemented with 1 mM Ca²⁺, Mn²⁺ and Mg²⁺ ions may be added), and the mixture may be poured over a BHIS bottom agar plate (1.5% agar BHIS). The plates may be allowed to gel at room temperature, and then incubated for 30 min at 37 C in anaerobic environment. At this stage, 5 μL of samples containing phage or media only as control may be dropped on the plate, left to absorb, and then may be incubated for 16 hours until plaques are visible for counting.

[0159] In some embodiments, a liquid media assay is used to phenotype the bacteriophage. In some embodiments, liquid-based phage infection assays follow the time-course of infection and can provide more than quantitative end-points of infection as compared to the solid-phase plaque assays. In some embodiments, by mixing phage with bacteria in liquid medium, then following the turbidity of the culture over time, one can discern finer differences (e.g., a delay in the time of cell lysis) between how different bacterial strains interact with the phage.

[0160] In some embodiments, a liquid-based phage infection assays is used to measure the time duration from the beginning of the experiment, when the bacteria and phages are mixed together until the host bacteria develops resistance to the phages (presumably by mutation). This period is also known as time-to-mutant (TTM). Such TTM assay was used to produce the results presented in FIGS. 5A-5G.

[0161] In some embodiments, the TTM is declared synergistic when the OD reading reaches a predetermined threshold (e.g. 0.1 OD600). Then synergistic redundancy effect is concluded if the TTM of a combination (e.g. X,Y) is for example 50% longer than the longer TTM of the individual member phages (e.g., the TTM of X by itself and the TTM of Y by itself).

[0162] In one embodiment, the synergistic effect is defined as above 10%, 20%, 30%, 40%, 50%, 60%, 70%, 80% above the longer individual phage member TTM.

[0163] In some embodiments, the liquid media assay allows for high-throughput measurements by using 96-well plates and reading optical density in a plate reader.

[0164] For example, a bacterial strain may be grown for 16 hours until an OD₆₀₀ of about 1.5-2. This culture may then be diluted using BHIS medium to a starting optical density, typically between 0.03 and 0.05 OD₆₀₀. A volume of 200 μL of culture may then be dispensed into the wells of a Nunclon flat-bottomed 96-well plate. 10 p L of a sample containing phage or 10 μL of medium as control may be added to each well. The wells may be covered with 50 μL of mineral oil to limit evaporation, and a thin sterile optically transparent polyurethane film may be added to keep the culture sterile. Optical density measurements may be carried out every 20 minutes, e.g., in a Tecan Infinite M200 plate reader connected to a Tecan EVO75 robot. Between measurements, the plate may be incubated while shaking at 37° C., e.g., inside the EVO75 incubator.

[0165] In some embodiments, infectivity is determined by the plaque presence in a solid assay only. In some embodiments, infectivity is determined by the plaque presence in a liquid assay only. In some embodiments, infectivity is determined by the plaque presence in both the liquid assay and the solid assay.

[0166] The bacteriophages described herein are typically present in a preparation in which their prevalence (i.e., concentration) is enriched over that (exceeds that) found in nature.

[0167] The term “preparation” refers to a composition in which the prevalence of bacteriophage is enriched over that found in nature. Since bacteriophages infect bacterial cells, they may be found in specimens or samples which are rich in bacteria—e.g. environmental samples such as sewage, wastewater and biological samples including feces. According to some embodiments of the invention, the preparation comprises less than 50 microbial species, e.g., bacteria and fungi—e.g., less than 40 bacterial species, less than 30 bacterial species, less than 20 bacterial species, less than 10 bacterial species, less than 5 bacterial species, less than 4 bacterial species, less than 3 bacterial species, less than 2 bacterial species or even devoid completely of bacteria.

[0168] According to a particular embodiment, the preparation comprises a single strain of bacteriophage (or a functional homolog thereof), no more than two different bacteriophage strains (or functional homologs thereof), no more than three different bacteriophage strains (or functional homologs thereof), no more than four different bacteriophage strains (or functional homologs thereof), no more than five different bacteriophage strains (or functional homologs thereof), no more than six different bacteriophage strains (or functional homologs thereof), no more than seven different bacteriophage strains (or functional homologs thereof), no more than eight different bacteriophage strains (or functional homologs thereof), no more than nine different bacteriophage strains (or functional homologs thereof), or no more than ten different bacteriophage strains (or functional homologs thereof).

[0169] In one embodiment, the preparation comprises a plurality of phage strains when at least one of the phage strains is CF1_20NOV10 (having the genome sequence at least 90% (e.g., at least 91%, 92%, 93%, 94%, 95%, 96%, 97%, 98%, 99%, 99.2%, 99.4%, 99.6%, 99.8%, 99.9% or 100%) identical to the sequence as set forth in SEQ ID NO: 1).

[0170] In another embodiment, the preparation comprises a plurality of phage strains when at least one of the phage strains is CF1_20DEC107 (having the genome sequence at least 90% (e.g., at least 91%, 92%, 93%, 94%, 95%, 96%, 97%, 98%, 99%, 99.2%, 99.4%, 99.6%, 99.8%, 99.9% or 100%) identical to the sequence as set forth in SEQ ID NO: 2).

[0171] In another embodiment, the preparation comprises a plurality of phage strains when at least one of the phage strains is CF1_20Dec110 (having the genome sequence at least 90% (e.g., at least 91%, 92%, 93%, 94%, 95%, 96%, 97%, 98%, 99%, 99.2%, 99.4%, 99.6%, 99.8%, 99.9% or 100%) identical to the sequence as set forth in SEQ ID NO: 3).

[0172] In one embodiment, the preparation comprises at least two different phage strains when at least one of the phage strains is CF1_20NOV10 (having the genome sequence at least 90% (e.g., at least 91%, 92%, 93%, 94%, 95%, 96%, 97%, 98%, 99%, 99.2%, 99.4%, 99.6%, 99.8%, 99.9% or 100%) identical to the sequence as set forth in SEQ ID NO: 1) and the other of the phage strains is CF1_20DEC107 (having the genome sequence at least 90% (e.g., at least 91%, 92%, 93%, 94%, 95%, 96%, 97%, 98%, 99%, 99.2%, 99.4%, 99.6%, 99.8%, 99.9% or 100%) identical to the sequence as set forth in SEQ ID NO: 2).

[0173] In one embodiment, the preparation comprises at least three different phage strains when at least one of the phage strains is CF1_20NOV10 (having the genome sequence at least 90% (e.g., at least 91%, 92%, 93%, 94%, 95%, 96%, 97%, 98%, 99%, 99.2%, 99.4%, 99.6%, 99.8%, 99.9% or 100%) identical to the sequence as set forth in SEQ ID NO: 1), the second of the phage strains is CF1_20DEC107 (having the genome sequence at least 90% (e.g., at least 91%, 92%, 93%, 94%, 95%, 96%, 97%, 98%, 99%, 99.2%, 99.4%, 99.6%, 99.8%, 99.9% or 100%) identical to the sequence as set forth in SEQ ID NO: 2) and the third of the phage strains is CF1_20Dec110 (having the genome sequence at least 90% (e.g., at least 91%, 92%, 93%, 94%, 95%, 96%, 97%, 98%, 99%, 99.2%, 99.4%, 99.6%, 99.8%, 99.9% or 100%) identical to the sequence as set forth in SEQ ID NO: 3).

[0174] Exemplary combinations of core phages in a single composition are provided in Table 1 herein below.

[0175] Additional contemplated combinations are provided in Example 2, Example 3 and Example 4 herein below.

TABLE 1

| | | | | Cocktail |
|---|---|---|---|---|
| Phage 1 | Phage 2 | Phage 3 | Phage 4 | name |
| CF1_20NOV10 | CF1_20DEC107 | CF1_20Dec110 | — | CFX1 |
| CF1_20NOV10 | CF1_20DEC107 | CF1_20Aug402 | — | CFX2 |
| CF1_20NOV10 | CF1_20DEC107 | CF1_20Oct199 | — | CFX3 |
| CF1_20DEC107 | CF1_20Dec110 | CF1_20Aug402 | — | CFX4 |
| CF1_20DEC107 | CF1_20Dec110 | CF1_20Oct199 | — | CFX5 |
| CF1_20Dec110 | CF1_20Aug402 | CF1_20Oct199 | — | CFX6 |
| CF1_20NOV10 | CF1_20DEC107 | CF1_20Dec110 | CF1_21Oct114 | CFX7 |
| CF1_20NOV10 | CF1_20DEC107 | CF1_20Aug402 | CF1_21Oct114 | CFX8 |
| CF1_20NOV10 | CF1_20DEC107 | CF1_20Oct199 | CF1_21Oct114 | CFX9 |
| CF1_20DEC107 | CF1_20Dec110 | CF1_20Aug402 | CF1_21Oct114 | CFX10 |
| CF1_20DEC107 | CF1_20Dec110 | CF1_20Oct199 | CF1_21Oct114 | CFX11 |
| CF1_20Dec110 | CF1_20Aug402 | CF1_20Oct199 | CF1_21Oct114 | CFX12 |

[0176] One exemplary cocktail contemplated by the present inventors is one which comprises the following phages: CF1_20NOV10, CF1_20DEC107 and CF1_20Dec110.

[0177] In one embodiment, the combination is selected such that more than 20% of the different strains of bacteria of a mixed population of Pseudomonas aeruginosa (e.g., comprising more than 40 different Pseudomonas aeruginosa strains, more than 60 different Pseudomonas aeruginosa strains and preferably more than 80 different Pseudomonas aeruginosa strains) are targeted (and lysed). In one embodiment, the combination is selected such that more than 20% of all the strains of Pseudomonas aeruginosa which infect humans are targeted and lysed. In a specific embodiment, the mixed population is selected from the list Pseudomonas aeruginosa strains in Example 1.

[0178] In another embodiment, the combination is selected such that at least 40, 60, 80, 100, 200, 300, 400, 500, 600, 700, 800, 900 or 1000 different Pseudomonas aeruginosa strains are targeted.

[0179] In one embodiment, the combination is selected such that more than 30% of the different strains of bacteria of a mixed population of Pseudomonas aeruginosa (e.g. comprising more than 40 different Pseudomonas aeruginosa strains, more than 60 different Pseudomonas aeruginosa strains and preferably more than 80 different Pseudomonas aeruginosa strains) are targeted (and lysed). In one embodiment, the combination is selected such that more than 30% of all the strains of Pseudomonas aeruginosa which infect humans are targeted and lysed.

[0180] In one embodiment, the combination is selected such that more than 40% of the different strains of bacteria of a mixed population of Pseudomonas aeruginosa (e.g. comprising more than 40 different Pseudomonas aeruginosa strains, more than 60 different Pseudomonas aeruginosa strains and preferably more than 80 different Pseudomonas aeruginosa strains) are targeted (and lysed). In one embodiment, the combination is selected such that more than 40% of all the strains of Pseudomonas aeruginosa which infect humans are targeted and lysed.

[0181] In one embodiment, the combination is selected such that more than 45% of the different strains of bacteria of a mixed population of Pseudomonas aeruginosa (e.g. comprising more than 40 different Pseudomonas aeruginosa strains, more than 60 different Pseudomonas aeruginosa strains and preferably more than 80 different Pseudomonas aeruginosa strains) are targeted (and lysed). In one embodiment, the combination is selected such that more than 45% of all the strains of Pseudomonas aeruginosa which infect humans are targeted and lysed.

[0182] In one embodiment, the combination is selected such that more than 50% of the different strains of bacteria of a mixed population of Pseudomonas aeruginosa (e.g. comprising more than 40 different Pseudomonas aeruginosa strains, more than 60 different Pseudomonas aeruginosa strains and preferably more than 80 different Pseudomonas aeruginosa strains) are targeted (and lysed). In one embodiment, the combination is selected such that more than 50% of all the strains of Pseudomonas aeruginosa which infect humans are targeted and lysed.

[0183] In one embodiment, the combination is selected such that more than 55% of the different strains of bacteria of a mixed population of Pseudomonas aeruginosa (e.g. comprising more than 40 different Pseudomonas aeruginosa strains, more than 60 different Pseudomonas aeruginosa strains and preferably more than 80 different Pseudomonas aeruginosa strains) are targeted (and lysed). In one embodiment, the combination is selected such that more than 55% of all the strains of Pseudomonas aeruginosa which infect humans are targeted and lysed.

[0184] In one embodiment, the combination is selected such that more than 60% of the different strains of bacteria of a mixed population of Pseudomonas aeruginosa (e.g. comprising more than 40 different Pseudomonas aeruginosa strains, more than 60 different Pseudomonas aeruginosa strains and preferably more than 80 different Pseudomonas aeruginosa strains) are targeted (and lysed). In one embodiment, the combination is selected such that more than 60% of all the strains of Pseudomonas aeruginosa which infect humans are targeted and lysed.

[0185] In one embodiment, the combination is selected such that more than 65% of the different strains of bacteria of a mixed population of Pseudomonas aeruginosa (e.g. comprising more than 40 different Pseudomonas aeruginosa strains, more than 60 different Pseudomonas aeruginosa strains and preferably more than 80 different Pseudomonas aeruginosa strains) are targeted (and lysed). In one embodiment, the combination is selected such that more than 65% of all the strains of Pseudomonas aeruginosa which infect humans are targeted and lysed.

[0186] In one embodiment, the combination is selected such that more than 70% of the different strains of bacteria of a mixed population of Pseudomonas aeruginosa (e.g. comprising more than 40 different Pseudomonas aeruginosa strains, more than 60 different Pseudomonas aeruginosa strains and preferably more than 80 different Pseudomonas aeruginosa strains) are targeted (and lysed). In one embodiment, the combination is selected such that more than 70% of all the strains of Pseudomonas aeruginosa which infect humans are targeted and lysed.

[0187] In one embodiment, the combination is selected such that more than 75% of the different strains of bacteria of a mixed population of Pseudomonas aeruginosa (e.g. comprising more than 40 different Pseudomonas aeruginosa strains, more than 60 different Pseudomonas aeruginosa strains and preferably more than 80 different Pseudomonas aeruginosa strains) are targeted (and lysed). In one embodiment, the combination is selected such that more than 75% of all the strains of Pseudomonas aeruginosa which infect humans are targeted and lysed.

[0188] In one embodiment, the combination is selected such that more than 80% of the different strains of bacteria of a mixed population of Pseudomonas aeruginosa (e.g. comprising more than 40 different Pseudomonas aeruginosa strains, more than 60 different Pseudomonas aeruginosa strains and preferably more than 80 different Pseudomonas aeruginosa strains) are targeted (and lysed). In one embodiment, the combination is selected such that more than 80% of all the strains of Pseudomonas aeruginosa which infect humans are targeted and lysed.

[0189] In one embodiment, the combination is selected such that more than 85% of the different strains of bacteria of a mixed population of Pseudomonas aeruginosa (e.g. comprising more than 40 different Pseudomonas aeruginosa strains, more than 60 different Pseudomonas aeruginosa strains and preferably more than 80 different Pseudomonas aeruginosa strains) are targeted (and lysed). In one embodiment, the combination is selected such that more than 85% of all the strains of Pseudomonas aeruginosa which infect humans are targeted and lysed.

[0190] In one embodiment, the combination is selected such that more than 90% of the different strains of bacteria of a mixed population of Pseudomonas aeruginosa (e.g. comprising more than 40 different Pseudomonas aeruginosa strains, more than 60 different Pseudomonas aeruginosa strains and preferably more than 80 different Pseudomonas aeruginosa strains) are targeted (and lysed). In one embodiment, the combination is selected such that more than 90% of all the strains of Pseudomonas aeruginosa which infect humans are targeted and lysed.

[0191] The combinations described herein can be selected to include phages which have overlapping host coverages. The host coverages can be defined in terms of bacterial strain classification, bacterial capsule type and/or Multi-locus sequence typing (MLST)—see (http://sanger-pathogens(dot)github(dot)io/ariba/).

[0192] In one embodiment, the combination is selected such that more than 10% of the different strains of bacteria of a mixed population of Pseudomonas aeruginosa (e.g. comprising more than 20 different Pseudomonas aeruginosa strains, more than 60 different Pseudomonas aeruginosa strains and preferably more than 80 different Pseudomonas aeruginosa strains) are targeted by more than one phage strain (e.g. at least 2 phage strains of the combination, at least 3 phage strains of the combination, at least 4 phage strains of the combination or at least 5 phage strains of the combination). In one embodiment, the combination is selected such that more than 10% of all the strains of Pseudomonas aeruginosa which infect humans are targeted and lysed by more than one phage strain (e.g. at least 2 phage strains of the combination, at least 3 phage strains of the combination, at least 4 phage strains of the combination or at least 5 phage strains of the combination).

[0193] In another embodiment, the combination is selected such that at least 10, 20, 40, 60, 80, 100 specific Pseudomonas aeruginosa strains are targeted by more than 1 (e.g. 2, 3, 4 or 5) phage strain of the combination.

[0194] In another embodiment, the combination is selected such that more than 15% of the different strains of bacteria of a mixed population of Pseudomonas aeruginosa (e.g. comprising more than 20 different Pseudomonas aeruginosa strains, more than 60 different Pseudomonas aeruginosa strains and preferably more than 80 different Pseudomonas aeruginosa strains) are targeted by more than one phage strain (e.g. at least 2 phage strains of the combination, at least 3 phage strains of the combination, at least 4 phage strains of the combination or at least 5 phage strains of the combination). In one embodiment, the combination is selected such that more than 15% of all the strains of Pseudomonas aeruginosa which infect humans are targeted and lysed by more than one phage strain (e.g. at least 2 phage strains of the combination, at least 3 phage strains of the combination, at least 4 phage strains of the combination or at least 5 phage strains of the combination).

[0195] In another embodiment, the combination is selected such that more than 20% of the different strains of bacteria of a mixed population of Pseudomonas aeruginosa (e.g. comprising more than 20 different Pseudomonas aeruginosa strains, more than 60 different Pseudomonas aeruginosa strains and preferably more than 80 different Pseudomonas aeruginosa strains) are targeted by more than one phage strain (e.g. at least 2 phage strains of the combination, at least 3 phage strains of the combination, at least 4 phage strains of the combination or at least 5 phage strains of the combination). In one embodiment, the combination is selected such that more than 20% of all the strains of Pseudomonas aeruginosa which infect humans are targeted and lysed by more than one phage strain (e.g. at least 2 phage strains of the combination, at least 3 phage strains of the combination, at least 4 phage strains of the combination or at least 5 phage strains of the combination).

[0196] In another embodiment, the combination is selected such that more than 25% of the different strains of bacteria of a mixed population of Pseudomonas aeruginosa (e.g. comprising more than 20 different Pseudomonas aeruginosa strains, more than 60 different Pseudomonas aeruginosa strains and preferably more than 80 different Pseudomonas aeruginosa strains) are targeted by more than one phage strain (e.g. at least 2 phage strains of the combination, at least 3 phage strains of the combination, at least 4 phage strains of the combination or at least 5 phage strains of the combination). In one embodiment, the combination is selected such that more than 25% of all the strains of Pseudomonas aeruginosa which infect humans are targeted and lysed by more than one phage strain (e.g. at least 2 phage strains of the combination, at least 3 phage strains of the combination, at least 4 phage strains of the combination or at least 5 phage strains of the combination).

[0197] In another embodiment, the combination is selected such that more than 30% of the different strains of bacteria of a mixed population of Pseudomonas aeruginosa (e.g. comprising more than 20 different Pseudomonas aeruginosa strains, more than 60 different Pseudomonas aeruginosa strains and preferably more than 80 different Pseudomonas aeruginosa strains) are targeted by more than one phage strain (e.g. at least 2 phage strains of the combination, at least 3 phage strains of the combination, at least 4 phage strains of the combination or at least 5 phage strains of the combination). In one embodiment, the combination is selected such that more than 30% of all the strains of Pseudomonas aeruginosa which infect humans are targeted and lysed by more than one phage strain (e.g. at least 2 phage strains of the combination, at least 3 phage strains of the combination, at least 4 phage strains of the combination or at least 5 phage strains of the combination).

[0198] In another embodiment, the combination is selected such that more than 35% of the different strains of bacteria of a mixed population of Pseudomonas aeruginosa (e.g. comprising more than 20 different Pseudomonas aeruginosa strains, more than 60 different Pseudomonas aeruginosa strains and preferably more than 80 different Pseudomonas aeruginosa strains) are targeted by more than one phage strain (e.g. at least 2 phage strains of the combination, at least 3 phage strains of the combination, at least 4 phage strains of the combination or at least 5 phage strains of the combination). In one embodiment, the combination is selected such that more than 35% of all the strains of Pseudomonas aeruginosa which infect humans are targeted and lysed by more than one phage strain (e.g. at least 2 phage strains of the combination, at least 3 phage strains of the combination, at least 4 phage strains of the combination or at least 5 phage strains of the combination).

[0199] In another embodiment, the combination is selected such that more than 40% of the different strains of bacteria of a mixed population of Pseudomonas aeruginosa (e.g. comprising more than 20 different Pseudomonas aeruginosa strains, more than 60 different Pseudomonas aeruginosa strains and preferably more than 80 different Pseudomonas aeruginosa strains) are targeted by more than one phage strain (e.g. at least 2 phage strains of the combination, at least 3 phage strains of the combination, at least 4 phage strains of the combination or at least 5 phage strains of the combination). In one embodiment, the combination is selected such that more than 40% of all the strains of Pseudomonas aeruginosa which infect humans are targeted and lysed by more than one phage strain (e.g. at least 2 phage strains of the combination, at least 3 phage strains of the combination, at least 4 phage strains of the combination or at least 5 phage strains of the combination).

[0200] In another embodiment, the combination is selected such that more than 45% of the different strains of bacteria of a mixed population of Pseudomonas aeruginosa (e.g. comprising more than 20 different Pseudomonas aeruginosa strains, more than 60 different Pseudomonas aeruginosa strains and preferably more than 80 different Pseudomonas aeruginosa strains) are targeted by more than one phage strain (e.g. at least 2 phage strains of the combination, at least 3 phage strains of the combination, at least 4 phage strains of the combination or at least 5 phage strains of the combination). In one embodiment, the combination is selected such that more than 45% of all the strains of Pseudomonas aeruginosa which infect humans are targeted and lysed by more than one phage strain (e.g. at least 2 phage strains of the combination, at least 3 phage strains of the combination, at least 4 phage strains of the combination or at least 5 phage strains of the combination).

[0201] In another embodiment, the combination is selected such that more than 50% of the different strains of bacteria of a mixed population of Pseudomonas aeruginosa (e.g. comprising more than 20 different Pseudomonas aeruginosa strains, more than 60 different Pseudomonas aeruginosa strains and preferably more than 80 different Pseudomonas aeruginosa strains) are targeted by more than one phage strain (e.g. at least 2 phage strains of the combination, at least 3 phage strains of the combination, at least 4 phage strains of the combination or at least 5 phage strains of the combination). In one embodiment, the combination is selected such that more than 50% of all the strains of Pseudomonas aeruginosa which infect humans are targeted and lysed by more than one phage strain (e.g. at least 2 phage strains of the combination, at least 3 phage strains of the combination, at least 4 phage strains of the combination or at least 5 phage strains of the combination).

[0202] It will be appreciated that, throughout the specification, when a phage is specifically named, the present invention also considers those phage that have at least 90% identity to the sequence of their genome, wherein the phage has a similar host range.

[0203] According to a specific embodiment, the preparation comprises at least about 10⁶ PFU, 10⁷ PFU, 10⁸ PFU, 10⁹ PFU, or even 10¹⁰ PFU or more of the above described (e.g. deposited) bacteriophages or functional homolog of same or progeny of same.

[0204] The bacteriophages described herein may be genetically modified such that their genomes include a heterologous sequence.

[0205] In one embodiment, the heterologous sequence serves as a marker signifying whether transformation is successful—e.g., a barcode sequence.

[0206] In another embodiment, the heterologous sequence encodes a therapeutic or diagnostic agent (also referred to herein as a payload). The therapeutic or diagnostic agent may be a nucleic acid (e.g. RNA silencing agent), a peptide or a protein. The therapeutic agent is typically selected according to the disease which is to be treated. Thus, for example if the bacteriophage is to be used for treating diseases associated with Pseudomonas aeruginosa infection, the therapeutic agent is typically one that is known to be useful for treating that disease.

[0207] As used herein, the term “RNA silencing agent” refers to an RNA which is capable of specifically inhibiting or “silencing” the expression of a target gene. In certain embodiments, the RNA silencing agent is capable of preventing complete processing (e.g., the full translation and/or expression) of an mRNA molecule through a post-transcriptional silencing mechanism. RNA silencing agents include noncoding RNA molecules, for example RNA duplexes comprising paired strands, as well as precursor RNAs from which such small non-coding RNAs can be generated. Exemplary RNA silencing agents include dsRNAs such as siRNAs, miRNAs and shRNAs. In one embodiment, the RNA silencing agent is capable of inducing RNA interference. In another embodiment, the RNA silencing agent is capable of mediating translational repression. According to an embodiment of the invention, the RNA silencing agent is specific to the target RNA and does not cross inhibit or silence a gene or a splice variant which exhibits 99% or less global homology to the target gene, e.g., less than 98%, 97%, 96%, 95%, 94%, 93%, 92%, 91%, 90%, 89%, 88%, 87%, 86%, 85%, 84%, 83%, 82%, 81% global homology to the target gene.

[0208] Exemplary RNA silencing agents include but are not limited to siRNA, shRNA, miRNA and guide RNA (gRNA).

[0209] The therapeutic agent may be a bacterial protein or peptide (e.g., a small bacterial peptide that could act as a vaccine in the subject treated with the bacteriophage), a therapeutic protein or peptide (e.g., a cytokine, e.g., IL-15), a soluble peptide or protein ligand (e.g., a STING agonist or TRAIL), an antibody or an antibody fragment that recognizes a virulent or disease-causing antigen or is useful in an immunotherapy (e.g., a checkpoint inhibitor), an enzyme that when expressed produces a therapeutic useful product (e.g., a bacterial enzyme or metabolic cassette that produces a therapeutically useful bacterial metabolite or other bacterial antigen; a bacterial enzyme that produces LPS or causes cleavage of LPS from the outer membrane of gram negative bacteria), a shared tumor antigen or an enzyme that when expressed produces a shared tumor antigen, a unique tumor antigen or neoantigen or an enzyme that when expressed produces a unique tumor antigen or neoantigen,

[0210] In another embodiment, the therapeutic agent is an agent that is therapeutic in the treatment of cystic fibrosis.

[0211] According to another embodiment, the therapeutic agent is an immune modulating agent.

[0212] Examples of immune modulating agents include immunomodulatory cytokines, including but not limited to, IL-2, IL-15, IL-7, IL-21, GM-CSF as well as any other cytokines that are capable of further enhancing immune responses; immunomodulatory antibodies, including but not limited to, anti-CTLA4, anti-CD40, anti-41BB, anti-OX40, anti-PD1 and anti-PDL1.

[0213] Examples of diagnostic agents include fluorescent proteins or enzymes producing a colorimetric reaction. Exemplary proteins that generate a detectable signal include, but are not limited to green fluorescent protein (Genbank Accession No. AAL33912), alkaline phosphatase (Genbank Accession No. AAK73766), peroxidase (Genbank Accession No. NP_568674), histidine tag (Genbank Accession No. AAK09208), Myc tag (Genbank Accession No. AF329457), biotin ligase tag (Genbank Accession No. NP_561589), orange fluorescent protein (Genbank Accession No. AAL33917), beta galactosidase (Genbank Accession No. NM_125776), Fluorescein isothiocyanate (Genbank Accession No. AAF22695) and strepavidin (Genbank Accession No. S11540).

[0214] In another example, the diagnostic agent is a luminescent protein such as products of bacterial luciferase genes, e.g., the luciferase genes encoded by Vibrio harveyi, Vibrio fischeri, and Xenorhabdus luminescens, the firefly luciferase gene FFlux, and the like.

[0215] Recombinant methods for inserting heterologous sequences into a phage genome are well-known in the art. The appropriate coding sequence is inserted in one or more of several locations in the phage genome. In one embodiment, the nucleic acid insert that is introduced into the phage genome is approximately no more than 10% of the phage genome length.

[0216] The payload coding sequence is inserted either after early, middle or late expressing phage genes and it can be expressed as part of a phage operon, relying on either an existing phage operon, promoter and terminator, or as a distinct operon. In the latter case, a relevant promoter and terminator from the phage is inserted as part of the newly formed operon.

[0217] For example, if strong expression of a payload is required, the payload coding sequence is added after the stop codon of the major capsid protein and expressed as part of the major capsid operon. Alternatively, it can be expressed by addition of a major capsid protein promoter and terminator as an individual newly formed operon which can be inserted anywhere in the phage genome that would not damage the functionality of the phage. If low expression of a payload is desired, the payload coding sequence can be added after the terminase gene (or other low expressing gene), which usually has low expression. Moreover, payload levels are tuned by adding a ribosome binding site with a desired strength.

[0218] In order to avoid negatively affecting phage infectivity and specificity, the payload coding sequence is typically not inserted inside an existing phage open reading frame. An exception to this is the case when the payload is intended to be expressed as a fusion protein of the phage outer coat. In that latter case of payload display, the payload coding sequence is added in frame to sequence encoding the phage coat protein.

[0219] The bacteriophages described herein may be used to treat subjects having diseases associated with Pseudomonas aeruginosa infection.

[0220] Diseases associated with Pseudomonas aeruginosa infection include cystic fibrosis and infectious wounds.

[0221] As used herein, the term “subject” includes mammals, preferably human beings at any age which suffer from the pathology. Those in need of treatment may include individuals already having CF, as well as those at risk of having, or who may ultimately acquire the disease. The need for treatment is assessed, e.g., by the presence of one or more risk factors associated with the development of CF, the presence or progression of CF, or likely receptiveness to treatment of a subject having CF. For example, “treating” IBD may encompass reducing or eliminating associated symptoms, and does not necessarily encompass the elimination of the underlying disease etiology, e.g., a genetic instability locus.

[0222] The term “treating” refers to inhibiting, preventing or arresting the development of a pathology (disease, disorder or condition) and/or causing the reduction, remission, or regression of a pathology. Those of skill in the art will understand that various methodologies and assays can be used to assess the development of a pathology, and similarly, various methodologies and assays may be used to assess the reduction, remission or regression of a pathology.

[0223] The bacteriophage may be used per se or as part of a pharmaceutical composition, where it is mixed with suitable carriers or excipients.

[0224] As used herein a “pharmaceutical composition” refers to a preparation of one or more of the active ingredients described herein with other chemical components such as physiologically suitable carriers and excipients. The purpose of a pharmaceutical composition is to facilitate administration of a compound to an organism.

[0225] Herein the term “active ingredient” refers to the bacteriophage accountable for the biological effect.

[0226] Hereinafter, the phrases “physiologically acceptable carrier” and “pharmaceutically acceptable carrier” which may be interchangeably used refer to a carrier or a diluent that does not cause significant irritation to an organism and does not abrogate the biological activity and properties of the administered compound.

[0227] Herein the term “excipient” refers to an inert substance added to a pharmaceutical composition to further facilitate administration of an active ingredient. Examples, without limitation, of excipients include calcium carbonate, calcium phosphate, various sugars and types of starch, cellulose derivatives, gelatin, vegetable oils and polyethylene glycols.

[0228] Techniques for formulation and administration of drugs may be found in “Remington's Pharmaceutical Sciences,” Mack Publishing Co., Easton, PA, latest edition, which is incorporated herein by reference.

[0229] Suitable routes of administration may, for example, include inhalation (e.g., by inhaler or nebulizer), topical, oral, rectal, transmucosal, especially transnasal, intestinal or parenteral delivery, including intramuscular, subcutaneous and intramedullary injections as well as intrathecal, direct intraventricular, intracardiac, e.g., into the right or left ventricular cavity, into the common coronary artery, intravenous, intraperitoneal, intranasal, or intraocular injections.

[0230] Alternately, one may administer the pharmaceutical composition in a local rather than systemic manner, for example, via injection of the pharmaceutical composition directly into a tissue region of a patient. In one embodiment, the bacteriophage may be administered directly into the tumor of the subject.

[0231] Pharmaceutical compositions of some embodiments of the invention may be manufactured by processes well known in the art, e.g., by means of conventional mixing, dissolving, granulating, dragee-making, levigating, emulsifying, encapsulating, entrapping, spray drying, coating or lyophilizing processes.

[0232] Pharmaceutical compositions for use in accordance with some embodiments of the invention thus may be formulated in conventional manner using one or more physiologically acceptable carriers comprising excipients and auxiliaries, which facilitate processing of the active ingredients into preparations which, can be used pharmaceutically. Proper formulation is dependent upon the route of administration chosen.

[0233] For injection, the active ingredients of the pharmaceutical composition may be formulated in aqueous solutions, preferably in physiologically compatible buffers such as Hank's solution, Ringer's solution, or physiological salt buffer. For transmucosal administration, penetrants appropriate to the barrier to be permeated are used in the formulation. Such penetrants are generally known in the art.

[0234] For oral administration, the pharmaceutical composition can be formulated readily by combining the active compounds with pharmaceutically acceptable carriers well known in the art. Such carriers enable the pharmaceutical composition to be formulated as tablets, pills, dragees, capsules, liquids, gels, syrups, slurries, suspensions, and the like, for oral ingestion by a patient. Pharmacological preparations for oral use can be made using a solid excipient, optionally grinding the resulting mixture, and processing the mixture of granules, after adding suitable auxiliaries if desired, to obtain tablets or dragee cores. Suitable excipients are, in particular, fillers such as sugars, including lactose, sucrose, mannitol, or sorbitol; cellulose preparations such as, for example, maize starch, wheat starch, rice starch, potato starch, gelatin, gum tragacanth, methyl cellulose, hydroxypropylmethyl-cellulose, sodium carbomethylcellulose; and/or physiologically acceptable polymers such as polyvinylpyrrolidone (PVP). If desired, disintegrating agents may be added, such as cross-linked polyvinyl pyrrolidone, agar, or alginic acid or a salt thereof such as sodium alginate.

[0235] Dragee cores are provided with suitable coatings. For this purpose, concentrated sugar solutions may be used which may optionally contain gum arabic, talc, polyvinyl pyrrolidone, carbopol gel, polyethylene glycol, titanium dioxide, lacquer solutions and suitable organic solvents or solvent mixtures. Dyestuffs or pigments may be added to the tablets or dragee coatings for identification or to characterize different combinations of active compound doses.

[0236] Pharmaceutical compositions which can be used orally, include push-fit capsules made of gelatin as well as soft, sealed capsules made of gelatin and a plasticizer, such as glycerol or sorbitol. The push-fit capsules may contain the active ingredients in admixture with filler such as lactose, binders such as starches, lubricants such as talc or magnesium stearate and, optionally, stabilizers. In soft capsules, the active ingredients may be dissolved or suspended in suitable liquids, such as fatty oils, liquid paraffin, or liquid polyethylene glycols. In addition, stabilizers may be added. All formulations for oral administration should be in dosages suitable for the chosen route of administration.

[0237] For buccal administration, the compositions may take the form of tablets or lozenges formulated in conventional manner.

[0238] For administration by nasal inhalation, the active ingredients for use according to some embodiments of the invention are conveniently delivered in the form of an aerosol spray presentation from a pressurized pack with the use of a suitable propellant, e.g., dichlorodifluoromethane, trichlorofluoromethane, dichloro-tetrafluoroethane or carbon dioxide. In the case of a pressurized aerosol, the dosage unit may be determined by providing a valve to deliver a metered amount. Capsules and cartridges of, e.g., gelatin for use in a dispenser may be formulated containing a powder mix of the compound and a suitable powder base such as lactose or starch.

[0239] The pharmaceutical composition described herein may be formulated for parenteral administration, e.g., by bolus injection or continuous infusion. Formulations for injection may be presented in unit dosage form, e.g., in ampoules or in multidose containers with optionally, an added preservative. The compositions may be suspensions, solutions or emulsions in oily or aqueous vehicles, and may contain formulatory agents such as suspending, stabilizing and/or dispersing agents.

[0240] Pharmaceutical compositions for parenteral administration include aqueous solutions of the active preparation in water-soluble form. Additionally, suspensions of the active ingredients may be prepared as appropriate oily or water based injection suspensions. Suitable lipophilic solvents or vehicles include fatty oils such as sesame oil, or synthetic fatty acids esters such as ethyl oleate, triglycerides or liposomes. Aqueous injection suspensions may contain substances, which increase the viscosity of the suspension, such as sodium carboxymethyl cellulose, sorbitol or dextran. Optionally, the suspension may also contain suitable stabilizers or agents which increase the solubility of the active ingredients to allow for the preparation of highly concentrated solutions.

[0241] Alternatively, the active ingredient may be in powder form for constitution with a suitable vehicle, e.g., sterile, pyrogen-free water based solution, before use.

[0242] The pharmaceutical composition of some embodiments of the invention may also be formulated in rectal compositions such as suppositories or retention enemas, using, e.g., conventional suppository bases such as cocoa butter or other glycerides.

[0243] Pharmaceutical compositions suitable for use in context of some embodiments of the invention include compositions wherein the active ingredients are contained in an amount effective to achieve the intended purpose. More specifically, a therapeutically effective amount means an amount of active ingredients (bacteriophage) effective to prevent, alleviate or ameliorate symptoms of a disorder (e.g., inflammatory bowel disease) or prolong the survival of the subject being treated.

[0244] Determination of a therapeutically effective amount is well within the capability of those skilled in the art, especially in light of the detailed disclosure provided herein.

[0245] For any preparation used in the methods of the invention, the therapeutically effective amount or dose can be estimated initially from in vitro and cell culture assays. For example, a dose can be formulated in animal models to achieve a desired concentration or titer. Such information can be used to more accurately determine useful doses in humans.

[0246] In some embodiments, the composition is delivered to a subject in need thereof so as to provide one or more bacteriophage in an amount corresponding to a multiplicity of infection (MOI) of about 1 to about 10. MOI is determined by assessing the approximate bacterial load in the site of infection, or using an estimate for a given type of disease and then providing phage in an amount calculated to give the desired MOI.

[0247] In some embodiments, MOI may be selected based on the “multiplicity of 10 rule,” which states that where there are on average in order of 10 phages adsorbed per bacterium, bacterial density reduces significantly (Abedon S T, 2009, Foodborne Pathog Dis 6:807-815; and Kasman L M, et al., 2002, J Virol 76:5557-5564); whereas lower-titer phage administration (e.g., using a MOI lower than 10) is unlikely to be successful (Goode D, et al., 2003, App Environ Microbiol 69:5032-5036; Kumari S, et al., 2010, J Infect Dev Ctries 4:367-377).

[0248] In other embodiments, the amount of phage (or combination of phages) is provided so as to reduce the amount of bacteria (e.g. Pseudomonas aeruginosa) present in the respiratory tract (e.g. trachea, bronchi (primary, secondary and tertiary), bronchioles (including terminal and respiratory), and lungs (including alveoli)) by at least 5%, 10%, 20%, 30%, 40%, 50%, 60%, 70%, 80%, 90% or even 100%.

[0249] In certain embodiments, the bacteriophage described herein is administered to ameliorate at least one manifestation of cystic fibrosis (CF) in a subject and results in one or more symptoms or physical parameters of the condition or disorder to improve by at least about 5%, 10%, 20%, 30%, 40%, 50%, 60%, 70%, 80%, 90%, 95%, or more as compared to levels in an untreated or control subject. In some embodiments, the improvement is measured by comparing the symptom or physical parameter in a subject prior to and following administration of the bacteriophage. In some embodiments, the measurable physical parameter is a reduction in bacterial colony-forming unit (CFU) count or plaque-forming unit (PFU) count from a sputum sample or blood sample of the subject.

[0250] Toxicity and therapeutic efficacy of the active ingredients described herein can be determined by standard pharmaceutical procedures in vitro, in cell cultures or experimental animals. The data obtained from these in vitro and cell culture assays and animal studies can be used in formulating a range of dosage for use in human. The dosage may vary depending upon the dosage form employed and the route of administration utilized. The exact formulation, route of administration and dosage can be chosen by the individual physician in view of the patient's condition. (See e.g., Fingl, et al., 1975, in “The Pharmacological Basis of Therapeutics,” Ch. 1 p. 1).

[0251] Dosage amount and interval may be adjusted individually to provide levels of the active ingredient are sufficient to induce or suppress the biological effect (minimal effective concentration, MEC). The MEC will vary for each preparation, but can be estimated from in vitro data. Dosages necessary to achieve the MEC will depend on individual characteristics and route of administration. Detection assays can be used to determine plasma concentrations.

[0252] Depending on the severity and responsiveness of the condition to be treated, dosing can be of a single or a plurality of administrations, with course of treatment lasting from several days to several weeks or until cure is effected or diminution of the disease state is achieved.

[0253] The amount of a composition to be administered will, of course, be dependent on the subject being treated, the severity of the affliction, the manner of administration, the judgment of the prescribing physician, etc.

[0254] Compositions of some embodiments of the invention may, if desired, be presented in a pack or dispenser device, such as an FDA approved kit, which may contain one or more unit dosage forms containing the active ingredient. The pack may, for example, comprise metal or plastic foil, such as a blister pack. The pack or dispenser device may be accompanied by instructions for administration. The pack or dispenser may also be accommodated by a notice associated with the container in a form prescribed by a governmental agency regulating the manufacture, use or sale of pharmaceuticals, which notice is reflective of approval by the agency of the form of the compositions or human or veterinary administration. Such notice, for example, may be of labeling approved by the U.S. Food and Drug Administration for prescription drugs or of an approved product insert. Compositions comprising a preparation of the invention formulated in a compatible pharmaceutical carrier may also be prepared, placed in an appropriate container, and labeled for treatment of an indicated condition, as is further detailed above.

[0255] Compositions described herein may comprise more than one phage strain. In one embodiment, the composition comprises 2 phage strains, 3 phage strains, 4 phage strains, 5 phage strains or more.

[0256] In one embodiment, the bacteriophage cocktails comprise a plurality of phages that target a single Pseudomonas aeruginosa strain.

[0257] In one embodiment, the bacteriophage cocktails comprise a plurality of phages that target more than one Pseudomonas aeruginosa strain.

[0258] Examples of particular combinations of phages are provided herein below.

[0259] The pharmaceutical compositions of the present invention also may be combined with one or more non-phage therapeutic and/or prophylactic agents, useful for the treatment and/or prevention of bacterial infections, as described herein and/or known in the art (e.g. one or more traditional antibiotic agents). Other therapeutic and/or prophylactic agents that may be used in combination with the phage(s) or phage product(s) of the invention include, but are not limited to, antibiotic agents, anti-inflammatory agents, antiviral agents, antifungal agents, or local anesthetic agents.

[0260] Standard or traditional antibiotic agents that can be administered with the bacteriophages described herein include, but are not limited to, amikacin, gentamicin, kanamycin, neomycin, netilmicin, paromomycin, rhodostreptomycin, streptomycin, tobramycin, apramycin, rifamycin, naphthomycin, mupirocin, geldanamycin, ansamitocin, carbacephems, imipenem, meropenem, ertapenem, faropenem, doripenem, panipenem/betamipron, biapenem, PZ-601, cephalosporins, cefacetrile, cefadroxil, cefalexin, cefaloglycin, cefalonium, cefaloridine, cefalotin, cefapirin, cefatrizine, cefazaflur, cefazedone, cefazolin, cefradine, cefroxadine, ceftezole, cefaclor, cefonicid, cefprozil, cefuroxime, cefuzonam, cefmetazole, cefotetan, cefoxitin, cefcapene, cefdaloxime, cefdinir, cefditoren, cefetamet, cefixime, cefmenoxime, cefteram, ceftibuten, ceftiofur, ceftiolene, ceftizoxime, ceftriaxone, cefoperazone, ceftazidime latamoxef, cefclidine, cefepime, cefluprenam, cefoselis, cefozopran, cefpirome, cefquinome, flomoxef. ceftobiprole, azithromycin, clarithromycin, dirithromycin, erythromycin, roxithromycin, aztreonam, pencillin and penicillin derivatives, actinomycin, bacitracin, colistin, polymyxin B, cinoxacin, flumequine, nalidixic acid, oxolinic acid, piromidic acid, pipemidic acid, rosoxacin, ciprofloxacin, enoxacin, fleroxacin, lomefloxacin, nadifloxacin, norfloxacin, ofloxacin, pefloxacin, rufloxacin, balofloxacin, gatifloxacin, grepafloxacin, levofloxacin, moxifloxacin, pazufloxacin, sparfloxacin, temafloxacin, tosufloxacin, clinafloxacin, garenoxacin, gemifloxacin, stifloxacin, trovalfloxacin, prulifloxacin, acetazolamide, benzolamide, bumetanide, celecoxib, chlorthalidone, clopamide, dichlorphenamide, dorzolamide, ethoxyzolamide, furosemide, hydrochlorothiazide, indapamide, mafendide, mefruside, metolazone, probenecid, sulfacetamide, sulfadimethoxine, sulfadoxine, sulfanilamides, sulfamethoxazole, sulfasalazine, sultiame, sumatriptan, xipamide, tetracycline, chlortetracycline, oxytetracycline, doxycycline, lymecycline, meclocycline, methacycline, minocycline, rolitetracycline, methicillin, nafcillin, oxacilin, cloxacillin, vancomycin, teicoplanin, clindamycin, co-trimoxazole, flucloxacillin, dicloxacillin, ampicillin, amoxicillin and any combination thereof.

[0261] Standard antifungal agents include amphotericin B such as liposomal amphotericin B and non-liposomal amphotericin B.

[0262] The present inventors further contemplate administering to the subject a probiotic which comprises “good” bacteria to occupy the niche left by the reduced “negative” bacteria. Such probiotic bacteria may comprise lactobacillus, saccharomyces boulardii, and/or Bifidobacterium.

[0263] The bacteriophages and bacteriophage cocktails of the invention can be used in anti-infective compositions for controlling the growth of bacteria, in particular Pseudomonas aeruginosa, in order to prevent or reduce the incidence of nosocomial infections. The anti-infective compositions find use in reducing or inhibiting colonization or growth of bacterial on a surface contacted therewith. The bacteriophages of the invention may be incorporated into compositions that are formulated for application to biological surfaces, such as the skin and mucus membranes, as well as for application to non-biological surfaces.

[0264] Anti-infective formulations for use on biological surfaces include, but are not limited to, gels, creams, ointments, sprays, and the like. In particular embodiments, the anti-infective formulation is used to sterilize a surgical field, or the hands and/or exposed skin of healthcare workers and/or patients.

[0265] Anti-infective formulations for use on non-biological surfaces include sprays, solutions, suspensions, wipes impregnated with a solution or suspension and the like. In particular embodiments, the anti-infective formulation is used on solid surfaces in hospitals, nursing homes, ambulances, etc., including, e.g., appliances, countertops, and medical devices, hospital equipment. In preferred embodiments, the non-biological surface is a surface of a hospital apparatus or piece of hospital equipment. In particularly preferred embodiments, the non-biological surface is a surgical apparatus or piece of surgical equipment.

[0266] The present invention also encompasses diagnostic methods for determining the causative agent at the site of the bacterial infection. In certain embodiments, the diagnosis of the causative agent of a bacterial infection is performed by (i) culturing a sample from a patient, e.g., a sputum sample, a tumor biopsy, stool sample or other sample appropriate for culturing the bacteria causing the infection; (ii) contacting the culture with one or more bacteriophages of the invention; and (iii) monitoring for evidence of cell growth and/or lysis of the culture. Because the activity of phages tends to be species or strain specific, susceptibility, or lack of susceptibility, to one or more phages of the invention can indicate the species or strain of bacteria causing the infection.

[0267] The sample may be a tissue biopsy or swab collected from the patient, or a fluid sample, such as blood, tears, or urine.

[0268] As used herein the term “about” refers to ±10%.

[0269] The terms “comprises,” “comprising,” “includes,” “including,” “having” and their conjugates mean “including but not limited to.”

[0270] The term “consisting of” means “including and limited to.”

[0271] The term “consisting essentially of” means that the composition, method or structure may include additional ingredients, steps and/or parts, but only if the additional ingredients, steps and/or parts do not materially alter the basic and novel characteristics of the claimed composition, method or structure.

[0272] As used herein, the singular form “a,” “an,” and “the” include plural references unless the context clearly dictates otherwise. For example, the term “a compound” or “at least one compound” may include a plurality of compounds, including mixtures thereof.

[0273] Throughout this application, various embodiments of this invention may be presented in a range format. It should be understood that the description in range format is merely for convenience and brevity and should not be construed as an inflexible limitation on the scope of the invention. Accordingly, the description of a range should be considered to have specifically disclosed all the possible subranges as well as individual numerical values within that range. For example, description of a range such as from 1 to 6 should be considered to have specifically disclosed subranges such as from 1 to 3, from 1 to 4, from 1 to 5, from 2 to 4, from 2 to 6, from 3 to 6 etc., as well as individual numbers within that range, for example, 1, 2, 3, 4, 5, and 6. This applies regardless of the breadth of the range.

[0274] Whenever a numerical range is indicated herein, it is meant to include any cited numeral (fractional or integral) within the indicated range. The phrases “ranging/ranges between” a first indicate number and a second indicate number and “ranging/ranges from” a first indicate number “to” a second indicate number are used herein interchangeably and are meant to include the first and second indicated numbers and all the fractional and integral numerals therebetween.

[0275] As used herein the term “method” refers to manners, means, techniques and procedures for accomplishing a given task including, but not limited to, those manners, means, techniques and procedures either known to, or readily developed from known manners, means, techniques and procedures by practitioners of the chemical, pharmacological, biological, biochemical and medical arts.

[0276] When reference is made to particular sequence listings, such reference is to be understood to also encompass sequences that substantially correspond to its complementary sequence as including minor sequence variations, resulting from, e.g., sequencing errors, cloning errors, or other alterations resulting in base substitution, base deletion or base addition, provided that the frequency of such variations is less than 1 in 50 nucleotides, alternatively, less than 1 in 100 nucleotides, alternatively, less than 1 in 200 nucleotides, alternatively, less than 1 in 500 nucleotides, alternatively, less than 1 in 1000 nucleotides, alternatively, less than 1 in 5,000 nucleotides, alternatively, less than 1 in 10,000 nucleotides.

[0277] It is understood that any Sequence Identification Number (SEQ ID NO) disclosed in the instant application can refer to either a DNA sequence or a RNA sequence, depending on the context where that SEQ ID NO is mentioned, even if that SEQ ID NO is expressed only in a DNA sequence format or a RNA sequence format. Similarly, though some sequences are expressed in a RNA sequence format (e.g., reciting U for uracil), depending on the actual type of molecule being described, it can refer to either the sequence of a RNA molecule comprising a dsRNA, or the sequence of a DNA molecule that corresponds to the RNA sequence shown. In any event, both DNA and RNA molecules having the sequences disclosed with any substitutes are envisioned.

[0278] It is appreciated that certain features of the invention, which are, for clarity, described in the context of separate embodiments, may also be provided in combination in a single embodiment. Conversely, various features of the invention, which are, for brevity, described in the context of a single embodiment, may also be provided separately or in any suitable subcombination or as suitable in any other described embodiment of the invention. Certain features described in the context of various embodiments are not to be considered essential features of those embodiments, unless the embodiment is inoperative without those elements.

[0279] Various embodiments and aspects of the present invention as delineated hereinabove and as claimed in the claims section below find experimental support in the following examples.

### EXAMPLES

[0280] Reference is now made to the following examples, which together with the above descriptions illustrate some embodiments of the invention in a non-limiting fashion.

[0281] Generally, the nomenclature used herein, and the laboratory procedures utilized in the present invention include molecular, biochemical, microbiological and recombinant DNA techniques. Such techniques are thoroughly explained in the literature. See, for example, “Molecular Cloning: A laboratory Manual” Sambrook et al., (1989); “Current Protocols in Molecular Biology” Volumes I-III Ausubel, R. M., ed. (1994); Ausubel et al., “Current Protocols in Molecular Biology,” John Wiley and Sons, Baltimore, Maryland (1989); Perbal, “A Practical Guide to Molecular Cloning,” John Wiley & Sons, New York (1988); Watson et al., “Recombinant DNA,” Scientific American Books, New York; Birren et al. (eds) “Genome Analysis: A Laboratory Manual Series,” Vols. 1-4, Cold Spring Harbor Laboratory Press, New York (1998); methodologies as set forth in U.S. Pat. Nos. 4,666,828; 4,683,202; 4,801,531; 5,192,659 and 5,272,057; “Cell Biology: A Laboratory Handbook,” Volumes I-III Cellis, J. E., ed. (1994); “Culture of Animal Cells—A Manual of Basic Technique” by Freshney, Wiley-Liss, N. Y. (1994), Third Edition; “Current Protocols in Immunology” Volumes I-III Coligan J. E., ed. (1994); Stites et al. (eds), “Basic and Clinical Immunology” (8th Edition), Appleton & Lange, Norwalk, C T (1994); Mishell and Shiigi (eds), “Selected Methods in Cellular Immunology,” W. H. Freeman and Co., New York (1980); available immunoassays are extensively described in the patent and scientific literature, see, for example, U.S. Pat. Nos. 3,791,932; 3,839,153; 3,850,752; 3,850,578; 3,853,987; 3,867,517; 3,879,262; 3,901,654; 3,935,074; 3,984,533; 3,996,345; 4,034,074; 4,098,876; 4,879,219; 5,011,771 and 5,281,521; “Oligonucleotide Synthesis” Gait, M. J., ed. (1984); “Nucleic Acid Hybridization” Hames, B. D., and Higgins S. J., eds. (1985); “Transcription and Translation” Hames, B. D., and Higgins S. J., eds. (1984); “Animal Cell Culture” Freshney, R. I., ed. (1986); “Immobilized Cells and Enzymes” IRL Press, (1986); “A Practical Guide to Molecular Cloning” Perbal, B., (1984) and “Methods in Enzymology” Vol. 1-317, Academic Press; “PCR Protocols: A Guide To Methods And Applications,” Academic Press, San Diego, C A (1990); Marshak et al., “Strategies for Protein Purification and Characterization—A Laboratory Course Manual” CSHL Press (1996); all of which are incorporated by reference as if fully set forth herein. Other general references are provided throughout this document. The procedures therein are believed to be well known in the art and are provided for the convenience of the reader. All the information contained therein is incorporated herein by reference.

### Example 1 Isolating and Characterizing Phage

### Materials and Methods

### Phage Isolation, Amplification and Determination of Phage Titers

[0282] Over 80 Pseudomonas aeruginosa bacterial strains from CF patients, were obtained from ATCC, CCUG, DSMZ, BEI and IMHA IHMA bacterial repositories, and used for isolation of infecting phage: ATCC-2192, ATCC-AB102, ATCC-AB111, ATCC-AB132, ATCC-AB145, ATCC-AB181, ATCC-AB91, BEI-EnvKY1, BEI-MX0560, BEI-PA14, BEI-PAK, CCUG 53399, CCUG 53401, CCUG 53571, CCUG 53573, CCUG 53574, CCUG 53667, CCUG 53668, CCUG 53747, CCUG 53767, CCUG 56990, CCUG 60285, CCUG-47318, DSMZ-KK1-1BAE, DSMZ-NN2-C40A, DSMZ-PAO1, DSMZ-RN3-D421, DSMZ-RP1-OC2E, DSMZ-TR1-3C2A, IHMA-2111700, IHMA-2111705, IHMA-2111714, IHMA-2111718, IHMA-2111723, IHMA-2111729, IHMA-2111733, IHMA-2111740, IHMA-2111746, IHMA-2111751, IHMA-2121752, IHMA-2121758, IHMA-2121761, IHMA-2121762, IHMA-2121764, IHMA-2121766, IHMA-2121771, IHMA-2121777, IHMA-2121781, IHMA-2121788, IHMA-2121789, IHMA-2121793, IHMA-2121797, IHMA-2121802, IHMA-2121809, IHMA-2121813, IHMA-2121816, IHMA-2121817, IHMA-2121830, IHMA-2121831, IHMA-2121833, IHMA-2121835, IHMA-2121836, IHMA-2121843, IHMA-2121877, IHMA-2121879, IHMA-2121880, IHMA-2121882, IHMA-2121883, IHMA-2121888, IHMA-2121889, IHMA-2121890, IHMA-2121894, IHMA-2121904, IHMA-2121907, IHMA-2121908, IHMA-2121910, IHMA-2121912, IHMA-2121920, IHMA-2125643, IHMA-2125647, IHMA-2125649, IHMA-2125650, IHMA-2125654, IHMA-2146665.

[0283] The phage were isolated from sewage samples after enrichment on PsA strains. The phages were amplified in liquid broth with divalent ions Mg²⁺, Mn²⁺ and Ca²⁺ (1 mM final concentration of each) and proper volume of isolated phage sample (MOI=0.01) into 4 mL log phase host culture at OD600=0.1-0.2, and incubating at 37° C., overnight. When amplified from a plaque a whole plaque was picked using a 1 μL loop and release the plaque into the culture OD600=0.1-0.2. Tubes were centrifuged and the supernatant was filtered by 0.45 μm filter.

[0284] Phage titers were determined by spot drop plaque assay as follows: host culture was prepared by inoculating 4 mL liquid BHIS with 5-10 colonies of the host and incubating at 37° C., until OD600 was 1.5 (overnight). 150 p L of host culture were added to 4 or 6 mL of molten top agar (BHIS top agar: BHIS media, 0.2% Agarose) with divalent ions Mn²⁺, Ca²⁺ and Mg²⁺ and dispensed on a Cetrimide or BHIS agar plate (1.5% Agarose). The plate was left to solidify for 15 min at RT. Then dilutions of phage sample were dropped (5 μL). Plates were incubated overnight before counting plaques (10-50 plaques/drop) and determination of phage titer (number of plaques×200×reciprocal of counted dilution=PFU/mL).

### Solid Host Range

[0285] Solid host range was performed in the same manner as detailed in the above section (“Phage isolation, amplification and determination of phage titers” section). Following plaques enumeration (10-50 plaques/drop) and determination of phage titer/host, the Efficiency of Plating (EOP) was calculated as:

$$EOP = \frac{titer on tested strain}{titer on production host}$$

[0286] For sensitive/resistant determination, EOP above 0.1 (EOP>0.1) entitled the corresponding bacteria sensitive to the respective phage. The % coverage was determined based on the number of sensitive bacteria that were found sensitive as percent of the number of bacterial strains tested.

### Liquid Host Range:

[0287] Ten bacterial colonies of each tested strain were picked and transferred into a culture tube prefilled with 4 mL of liquid BHIS. Cultures were incubated to OD600≥1.5 by shaking, 180 rpm, at 37° C. for overnight (15-16 h). Bacterial cultures were diluted using BHIS supplemented with 1 mM MMC ions to reach a final OD600 of 0.05 and dispensed into a 96-well plate. Each phage was diluted to a concentration of 10\hat{ }8 PFU/ml, and equal ratios were mixed to get cocktails combinations. Then, 10 μL of single or cocktail phages were added to the wells to a final concentration of 10\hat{ }6 PFU/well. For “no phage control” (NPC), BHIS was added to the appropriate wells. Mineral oil was added to each well to reduce evaporation of the samples, and the plates were covered with sterile film to allow bacteria growth and keep the culture sterile. Plates were incubated for 30-45 hours in a plate reader at 37° C. with shaking, and OD600 was measured every 20 minutes. Two biological repeats were performed for the assay, and BHIS media supplemented with 1 mM MMC ions served as a blank. After subtraction of the OD600 values measured in control wells with no bacteria (i.e., the optical absorbance of the medium) from the samples, the sum of all OD values measured for each treatment within the first 10 hours was calculated yielding the value of the “area under the curve” of an “OD-to-time graph” (AUC600). A bacterial strain was defined sensitive with respect to a phage if the ratio between the AUC600 treatment with the phage and the AUC600 of the no phage control (NPC) was smaller than 0.66, as presented in the following equation:

$$\frac{Phage treatment area under the curve}{NPC area under the curve} < 0.66$$

The % coverage was determined based on the number of sensitive bacteria that were found sensitive as percent of the number of bacterial strains tested.

### Results

[0288] Pseudomonas aeruginosa isolates from CF patients were used to hunt phages. Phages were isolated from environmental samples (e.g., sewage and water sources), purified, and sequenced. Their taxonomy was deduced from the sequence based on International Committee on Taxonomy of Viruses (ICTV) classification (Table 2). Additionally, the sequence was used to determine the distance (sequence homology) between the phages (FIG. 1).

TABLE 2
Exemplary Isolated Bacteriophage against
Pseudomonas aeruginosa species.

| Single | | | | |
|---|---|---|---|---|
| letter | | | | SEQ |
| designa- | | | | ID |
| tion | Phage | Family | Genus | NO: |
| a | CF1_20Nov10 | Podoviridae | Bruynoghevirus | 1 |
| b | CF1_20Dec107 | Myoviridae | Pbunavirus | 2 |
| c | CF1_20Dec110 | Myoviridae | Pakpunavirus | 3 |
| d | CF1_20Oct199 | Myoviridae | Pbunavirus | 4 |
| e | CF1_20Aug401 | Autographiviridae | Phikmvvirus | 5 |
| f | CF1_20Aug470 | Podoviridae | N/A | 6 |
| g | CF1_20sep416 | Myoviridae | Pakpunavirus | 7 |
| h | CF1_20Sep418 | Myoviridae | Pakpunavirus | 8 |
| j | CF1_20Sep420 | Siphoviridae | Nipunavirus | 9 |
| l | CF1_21Oct114 | Myoviridae | Phikzvirus | 10 |

TABLE 2.1
Exemplary Isolated Bacteriophage against
Pseudomonas aeruginosa species.

| Single | | | |
|---|---|---|---|
| letter | | | |
| designation | Phage | Deposit number | Date of deposit |
| a | CF1_20Nov10 | F/00182 | 29 Mar. 2022 |
| b | CF1_20Dec107 | F/00183 | 29 Mar. 2022 |
| c | CF1_20Dec110 | F/00184 | 29 Mar. 2022 |
| d | CF1_200ct199 | F/00185 | 29 Mar. 2022 |
| e | CF1_20Aug401 | F/00186 | 29 Mar. 2022 |
| f | CF1_20Aug470 | F/00187 | 29 Mar. 2022 |
| g | CF1_20sep416 | F/00188 | 29 Mar. 2022 |
| h | CF1_20Sep418 | F/00189 | 29 Mar. 2022 |
| j | CF1_20Sep420 | NA | NA |
| l | CF1_21Oct114 | F/00190 | 29 Mar. 2022 |

[0289] The % sequence homology (based on local BLAST) of the isolated phages was compared as set forth in FIG. 1.

[0290] The host ranges (HR) of the phages were tested. HR analysis of isolated phage was performed in solid assay and liquid assay as detailed above. The percent coverage of these isolated PA strains is summarized in Table 3, herein below.

TABLE 3

| Phage | % coverage (solid) | % coverage (Liquid) |
|---|---|---|
| CF1 20Nov10 | 54% | 63% |
| CF1_20Dec107 | 60% | 64% |
| CF1_20Dec110 | 42% | 40% |
| CF1_20Oct199 | 35% | Not tested |
| CF1_20Aug401 | 12% | Not tested |
| CF1_20Aug470 | 7% | Not tested |
| CF1_20sep416 | 18% | Not tested |
| CF1_20Sep418 | 26% | Not tested |
| CF1_20Sep420 | 3% | Not tested |
| CF1_21Oct114 | Not tested | 63% |

[0291] The % coverage for cocktails CFX1 and CFX7 was measured using the liquid assay and yielded 81% and 88%, respectively. The host range of the phage was also profiled according to the multilocus sequence typing (MLST) using the Antimicrobial Resistance Identification By Assembly (ARIBA) tool (sanger-pathogens(dot)github(dot) io/ariba/). The results are set forth in FIG. 2. An MLST instance where at least on bacterial member was found to be infected by the corresponding phage was marked “+.”

### Example 2 Phage Combinations Selected According to Bacterial Coverage as Defined by Strain

[0292] For this example, the particular phages are referred to by the single letter designation in Table 1, herein above.

### 2 Phage Combinations

[0293] 2 phage combinations were analyzed in silico for their ability to lyse the 85 different strains of Pseudomonas aeruginosa bacteria (as described for Example 1) based on the ability of the single phage to lyse the bacteria as assessed by a solid media assay.

[0294] The combinations are provided herein below. This trait is referred to as “at least 1 phage % coverage.” The number following each combination refers to the Percent trait performance—in this case the percent of the 85 strains that are targeted by the phage combination. The combinations are listed in descending performance grade.

[0295] Thus, for example in the case of [al;81], which provides the highest percent coverage of all the 2 phage combinations, CF1_20NOV10 and CF1_21Oct114 lysed 80% of all the strains of Pseudomonas aeruginosa analyzed. The combinations are: [al;81][bl;80][ab;80][cl;75][dl;74][ad;70][ac;69][bc;69][ah;65][bd;63][bh;62][gl;6 0][hl;58][ae;57][ag;57][el;57][af;56][fl;55][aj;55][cd;53][bg;52][be;51][bf;48][ch;45][jl;4 4][dh;38][bj;37][ce;30][cf;29][cg;27][cj;24][dg;22][fg;20][eg;18][dj;17][df;14][ej;14][gj; 14][ef;12][de;12][eh;11][gh;11][fh;5][fj;4].

[0296] The percent of host bacterial strains that are infected by two phages of a phage combination are provided. This trait is referred to as “at least 2 phage % coverage.” The phage combinations are ordered in descending performance grade.

[0297] Thus, for example, in the case of [bl;41], when CF1_20Dec107 and CF1_21Oct114 are used in a combination, 41% of the bacterial strains analyzed were targeted by both these phages. The combinations are:

[0298] [bl;41][al;38][ab;34][cl;33][bd;33][bc;32][hl;31][ac;27][dl;25][cd;23][ch;22][ad;2 0][cg;17][bh;17][dh;14][ah;14][ag;12][bg;10][gl;9][cf;7][el;7][ae;6][fl;5][eh;5][dg;5][af;4][df;4][bf;4][aj;3][bj;3][be;3][ce;3][ef;3][de;3][fg;2].

### 3 Phage Combinations

[0299] 3 phage combinations were analyzed in silico for their ability to lyse the 85 different strains of Pseudomonas aeruginosa bacteria based on the ability of the single phage to lyse the bacteria as assessed by a solid media assay.

[0300] The combinations are provided herein below. The number following each combination refers to the Percent trait performance. The phage combinations are ordered in descending performance grade.

[0301] For example, in the case of [abl;88], the combination that provided the highest percent coverage, CF1_20NOV10, CF1_20Dec107 and CF1_21Oct114 lysed 88% of all the strains of Pseudomonas aeruginosa analyzed. The combinations are:

[0302] [abl;88][adl;88][acl;86][bcl;84][abc;84][abd;83][bdl;83][ahl;82][ael;82][cdl;81][a bh;80][afl;79][bhl;79][abe;78][abf;78][ajl;77][abg;77][acd;76][agl;75][chl;72][abj;72][cel;71][bcd;70][bgl;69][ach;68][bel;67][dhl;67][cfl;67][adh;67][cgl;66][egl;66][bch;65][bfl; 64][dgl;63][fgl;63][acf;63][gjl;63][acg;62][adj;62][bdh;61][adf;60][ace;60][adg;60][afg;6 0][bjl;59][djl;59][cjl;59][acj;58][ejl;57][aef;57][bce;57][ade;57][del;57][ghl;57][efl;57][b eg;56][aeg;56][dfl;55][ehl;53][bcf;53][aeh;52][fjl;52][bfg;52][bdg;52][bcg;52][aej;52][be j;51][bef;51][bde;51][agh;50][afh;50][fhl;50][cdh;50][bdf;48][agj;47][afj;47][beh;47][bhj;46][ahj;46][bdj;44][bgh;44][bgj;42][bej;42][bfh;38][cdj;34][bfj;33][cdf;31][hjl;30][cde;3 0][cef;30][cdg;30][ceh;29][cej;28][ceg;28][cfg;27][egj;23][dfg;22][cfh;22][cgh;22][chj;2 0][cgj;19][cfj;19][deg;18][efg;18][egh;17][efj;14][fgj;14][dgj;14][dej;14][def;12][deh;11][efh;11][fgh;11][dgh;11][ehj;8][ghj;8][dhj;6][dfh;5][dfj;4].

[0303] The combinations with “at least 2 phage % coverage” are provided herein below. The phage combinations are ordered in descending performance grade.

[0304] Thus, for example, in the case of [abl;65], when CF1_20NOV10, CF1_20Dec107 and CF1_21Oct114 are used in a combination, 65% of the bacterial strains analyzed were targeted by at least 2 of the 3 phages. The combinations are:

[0305] [abl;65][acl;56][bcl;56][adl;53][bdl;52][abc;49][abd;47][bcd;45][ahl;44][agl;42][c dl;42][bhl;41][acd;40][abh;40][ach;40][chl;37][bch;37][bfl;35][bgl;33][abg;32][afl;32][d hl;32][bel;32][bdh;29][adh;29][ael;28][bcg;27][abf;26][cdh;26][ajl;25][bcf;24][cgl;24][a be;24][acg;22][acf;21][ace;21][acj;20][abj;20][cfl;20][cfg;20][cdg;20][adg;20][bjl;18][bc e;15][bdg;15][bfg;15][cel;14][agj;14][afg;12][aeg;12][cdf;12][bdf;12][dfl;11][adj;10][bcj;10][bdj;10][dfg;10][adf;9][aej;9][cgj;9][ceg;9][fgl;9][dgl;9][ehl;7][cjl;7][del;7][efl;7][aef;6][ade;6][egh;5][ceh;5][deh;5][beh;5][aeh;5][efh;5][cgh;5][agh;5][ejl;5][bej;4][afj;4][bfj;4][bgj;4][egl;3][cdj;3][beg;3][cde;3][bde;3][cef;3][def;3][bef;3].

[0306] The percent of host bacterial strains that are infected by three phages of a phage combination are provided. This trait is referred to as “at least 3 phage % coverage.” The phage combinations are ordered in descending performance grade.

[0307] Thus, for example, in the case of [chl;27], when CF1_20Dec110, CF1_20Sep418 and CF1_21Oct114 are used in a combination, 27% of the bacterial strains analyzed were targeted by each of the 3 phage. The combinations are:

[0308] [chl;27][bcl;26][abl;26][bdl;25][acl;23][bcd;22][abc;22][cdl;21][bhl;20][abd;20][dhl;17][ahl;17][bch;17][adl;16][acd;15][bdh;14][cdh;14][acg;12][ach;11][abh;11][beg;10][cgl;9][adh;8][ael;7][agl;6][bgl;6][afl;5][cfl;5][bdg;5][abg;5][cdg;5][cdf;4][acf;4][bdf;4][bcf;4][bel;3][del;3][cel;3][efl;3][abj;3][cef;3][ace;3][def;3][ade;3][abe;3][dgl;3][bef;3][c de;3][bce;3][aef;3][fgl;3][bde;3][dfl;2][bfl;2][afg;2][cfg;2][adf;2][abf;2].

### 4 Phage Combinations

[0309] 4 phage combinations were analyzed in silico for their ability to lyse the 85 different strains of Pseudomonas aeruginosa bacteria based on the ability of the single phage to lyse the bacteria as assessed by a solid media assay.

[0310] The combinations with the corresponding “at least 1 phage % coverage” are provided herein below. The phage combinations are ordered in descending performance grade.

[0311] For example, in the case of [abdl;91], the 4 phage combination that provided the highest percent coverage, CF1_20NOV10, CF1_20Dec107, CF1_20Oct199 and CF1_21Oct114 lysed 91% of all the strains of Pseudomonas aeruginosa analyzed. The combinations are:

[0312] [abdl;91][abcl;90][acdl;90][abhl;89][achl;86][bcdl;85][adhl;85][acel;85][abel;85][abcd;85][adjl;85][aejl;84][bchl;82][acfl;82][abfl;82][aefl;82][adel;82][abgl;81][acgl;81][a egl;81][acjl;81][abch;80][adfl;79][abdh;79][abdj;79][agjl;78][afjl;78][abde;78][adgl;78][abce;78][abef;78][afgl;78][cdhl;78][bdhl;78][abeg;78][abdf;78][abcf;78][abjl;77][abdg;7 7][abcg;77][abfg;77][aehl;76][ahjl;76][abeh;76][abej;76][abcj;75][bcel;75][begl;74][abfh;72][abgh;72][afhl;71][aghl;71][abgj;71][cefl;71][cdel;71][abfj;71][bcfl;70][acdh;70][ceg l;70][cdjl;70][bcjl;70][bdgl;69][bfgl;69][bcgl;69][cehl;69][cejl;68][egjl;68][bdel;67][befl; 67][cdfl;67][cdgl;66][degl;66][cfgl;66][bdjl;66][abhj;66][efgl;66][bcdh;64][bdfl;64][bghl;64][cfhl;64][cghl;64][dfgl;63][acdf;63][cgjl;63][cfjl;63][bgjl;63][fgjl;63][dgjl;63][acfg;6 2][acdg;62][acdj;62][eghl;61][behl;61][acde;60][acef;60][adfg;60][aceg;59][aceh;58][dej l;57][bejl;57][efjl;57][adef;57][bcde;57][bcef;57][bfhl;57][dghl;57][fghl;57][defl;57][bef g;56][adeg;56][bceg;56][aefg;56][bdeg;56][acgh;55][acfh;55][bcdj;55][bhjl;53][dehl;53][efhl;53][bcdf;53][bchj;53][begh;52][aegh;52][adeh;52][aefh;52][bceh;52][dfjl;52][bfjl;52][bdfg;52][bcfg;52][bcdg;52][acej;52][begj;52][adej;52][aefj;52][aegj;52][bcej;52][bdef; 51][ghjl;50][ehjl;50][adfh;50][adgh;50][afgh;50][dfhl;50][acfj;47][acgj;47][adfj;47][adgj; 47][afgj;47][befh;47][bdeh;47][achj;46][adhj;46][bdhj;46][chjl;46][bcfh;44][bdgh;44][bf gh;44][bcgh;44][bdej;42][bfgj;42][befj;42][bdgj;42][bcfj;42][bcgj;42][behj;41][aehj;41]1[bghj;41][fhjl;40][bdfh;38][dhjl;38][afhj;33][bfhj;33][bdfj;33][aghj;33][cdef;30][cdfg;30][cdeh;29][cegh;29][cefh;29][cdej;28][cegj;28][cefj;28][cdeg;28][cefg;28][cdhj;26][cehj;2 5][efgj;23][degj;23][cdfh;22][cdgh;22][cfgh;22][cfgj;19][cdfj;19][cdgj;19][defg;18][efgh;17][degh;17][cfhj;16][eghj;16][cghj;16][defj;14][dfgj;14][defh;11][dfgh;11][fghj;8][efhj;8][dghj;8][dehj;8].

[0313] The combinations with “at least 2 phage % coverage” are provided herein below. The phage combinations are ordered in descending performance grade.

[0314] Thus, for example, in the case of [abcl;75], when CF1_20NOV10, CF1_20Dec107, CF1_20Dec110 and CF1_21Oct114 are used in a combination, 75% of the bacterial strains analyzed were targeted by at least 2 of the 4 phage. The combinations are:

[0315] [abcl;75][abdl;70][acdl;64][bcdl;63][abhl;62][abgl;57][abcd;57][abfl;55][achl;55][abjl;51][bchl;51][abch;51][abel;50][bdhl;50][adhl;50][acfl;47][bcgl;45][abdh;44][acgl;4 2][afgl;42][adgl;42][acdh;41][bcdh;41][bcfl;41][cdhl;39][bcel;39][acel;39][abcf;39][adfl; 38][abcg;37][aegl;37][acjl;37][agjl;36][bdgl;36][bfgl;36][bdfl;35][abdg;35][abfg;35][abc e;33][adjl;33][begl;33][befl;32][bdel;32][abdf;31][bejl;31][abcj;31][acdj;31][bcdg;30][ac df;29][aghl;28][aefl;28][adel;28][abeg;28][acdg;27][bcfg;27][cfgl;27][cdgl;27][bcdf;26][abhj;26][bfjl;26][aejl;26][afjl;26][bgjl;26][bdjl;25][bcjl;25][acfg;25][abde;24][abef;24][a cej;23][behl;23][aehl;23][adfg;22][cegl;22][afhl;21][acde;21][acef;21][abdj;20][bcdj;20][cdfl;20][cdfg;20][achj;20][bcgj;19][abgj;19][acgj;19][aegj;19][acfj;19][bceg;18][aceg;18][aceh;17][abeh;17][bceh;17][bdfg;17][bcgh;16][abgh;16][cgjl;15][bhjl;15][cehl;15][bcef;15][bcde;15][adgj;14][cefl;14][abej;14][bfhl;14][bghl;14][cdel;14][afgj;14][cghl;14][bch j;13][aefg;12][adeg;12][dfgl;12][aegh;11][cegh;11][acgh;11][acfh;11][bcfh;11][abfh;11][cdjl;11][cejl;10][bcej;9][bcfj;9][abfj;9][cfgj;9][cegj;9][cdgj;9][aefj;9][adej;9][cdeg;9][cef g;9][aghj;8][cghj;8][ahjl;7][chjl;7][eghl;7][efhl;7][dehl;7][defl;7][cfhl;7][adhj;6][bdhj;6][adef;6][efgh;5][begh;5][adeh;5][cdeh;5][degh;5][befh;5][aefh;5][defh;5][bdeh;5][cefh;5][cfgh;5][adgh;5][cdgh;5][afgh;5][dejl;5][egjl;5][efjl;5][cfjl;5][bdej;4][adfj;4][bdfj;4][bdgj; 4][befj;4][begj;4][bfgj;4][degl;3][efgl;3][bdeg;3][befg;3][bdef;3][cdef;3].

[0316] The combinations with “at least 3 phage % coverage” are provided herein below. The phage combinations are ordered in descending performance grade.

[0317] Thus, for example, in the case of [abdl;40], when CF1_20NOV10, CF1_20Dec107, CF1_20Oct199 and CF1_21Oct114 are used in a combination, 40% of the bacterial strains analyzed were targeted by at least 3 of the 4 phage. The combinations are:

[0318] [abdl;40][abcl;40][achl;37][bcdl;35][abcd;34][bchl;34][acdl;33][abhl;31][abch;28][adhl;28][cdhl;28][abdh;26][bdhl;25][acgl;24][bcdh;23][acdh;23][abcg;22][abgl;21][bcfl;20][bcgl;18][abel;17][abfl;17][acdg;17][abcf;17][bcfg;15][acfl;14][acel;14][bcdg;12][acf g;12][abdg;12][abce;12][cdfl;11][bcel;10][abcj;10][abdj;10][cdfg;10][bcdf;9][acgj;9][ace g;9][adgl;9][cdgl;9][bfgl;9][cfgl;9][bdfl;8][abfg;7][bdfg;7][acjl;7][abjl;7][abdf;7][acdf;7][aefl;7][adel;7][afgl;6][bdgl;6][dfgl;6][adfl;5][acgh;5][aejl;5][abgj;4][abfj;4][abej;4][bcjl; 3][aegl;3][bdel;3][defl;3][befl;3][cdel;3][cefl;3][bceg;3][abeg;3][bcef;3][bcde;3][cdef;3][bdef;3][acef;3][abef;3][adef;3][acde;3][abde;3][adfg;2].

[0319] The percent of host strains that are infected by 4 phages of phage combinations is provided herein below. This trait is referred to herein as “at least 4 phage % coverage.” Thus, for example, in the case of [bcdl;21], when CF1_20Dec107, CF1_20Dec110, CF1_20Oct199 and CF1_21Oct114 are used in a combination, 21% of the bacterial strains tested were targeted by each of the four phage. The combinations are:

[0320] [bcdl;21][abcl;20][bchl;20][cdhl;17][bdhl;17][abdl;16][acdl;15][abcd;15][bcdh;14][achl;13][abhl;13][abch;11][adhl;10][abdh;8][acdh;8][acgl;6][bcgl;6][acfl;5][bcdg;5][ab cg;5][bcdf;4][cefl;3][defl;3][bcel;3][acel;3][cdel;3][abel;3][befl;3][adel;3][bdel;3][aefl;3][adef;3][cfgl;3][abce;3][cdef;3][bcde;3][bdgl;3][cdgl;3][bcef;3][afgl;3][bdef;3][acde;3][a bef;3][abde;3][acef;3][abgl;3][adfl;2][bcfl;2][abfl;2][cdfl;2][bdfl;2][acfg;2][abcf;2][abdf; 2][acdf;2].

### 5 Phage Combinations

[0321] 5 phage combinations were analyzed in silico for their ability to lyse the 85 different strains of Pseudomonas aeruginosa bacteria based on the ability of the single phage to lyse the bacteria as assessed by a solid media assay.

[0322] The combinations with “at least 1 phage % coverage” are provided herein below (out of 118,755 possible combinations, the top 0.4% (476) are provided). The number following each combination refers to the Percent trait performance—in this case the percent of the 85 strains that are targeted by the phage combination. The phage combinations are ordered in descending performance grade.

[0323] For example, in the case of [abcdl;91], the 5 phage combination that provided the highest percent coverage, CF1_20NOV10, CF1_20Dec107, CF1_20Dec110, CF1_20Oct199 and CF1_21Oct114 lysed 91% of all the strains of Pseudomonas aeruginosa analyzed. The combinations are:

[0324] [abcdl;91][abchl;89][abdhl;89][acdhl;89][acdel;85][abcel;85][abefl;85][acefl;85][abdel;85][abdjl;85][acegl;85][abegl;85][acdjl;85][acehl;84][abehl;84][abejl;84][adejl;84][aegjl;84][acejl;84][aefjl;84][acdfl;82][abcfl;82][abdfl;82][bcdhl;82][adefl;82][abdgl;81][a cfgl;81][abfgl;81][acdgl;81][abcgl;81][abcjl;81][aefgl;81][adegl;81][aehjl;80][abcdh;79][abcdj;79][abgjl;78][abfjl;78][adfjl;78][acgjl;78][afgjl;78][adgjl;78][acfjl;78][abcde;78][a bcef;78][adfgl;78][abdef;78][acghl;78][acfhl;78][abfhl;78][abghl;78][abefg;78][abdeg;78][abceg;78][abcdf;78][abdfg;77][abcfg;77][abcdg;77][abhjl;76][achjl;76][adehl;76][aefhl; 76][aeghl;76][adhjl;76][abceh;76][abefh;76][abegh;76][abdeh;76][abcej;76][abdej;76][ab efj;76][abegj;76][bcdel;75][bcefl;75][bdegl;74][befgl;74][bcegl;74][bcdjl;74][abfgh;72][a bcfh;72][abcgh;72][abdfh;72][abdgh;72][abfgj;71][abcfj;71][adghl;71][adfhl;71][abcgj;7 1][abdfj;71][abdgj;71][cdefl;71][afghl;71][bcdfl;70][cefgl;70][cdegl;70][afhjl;70][aghjl;7 0][bcfgl;69][bcdgl;69][bdfgl;69][bcehl;69][ceghl;69][beghl;69][cefhl;69][cdehl;69][degjl;68][cefjl;68][begjl;68][cdejl;68][cegjl;68][efgjl;68][bcejl;68][bdefl;67][defgl;66][abchj;6 6][abdhj;66][abehj;66][cdfgl;66][bdghl;64][cfghl;64][bcghl;64][bcfhl;64][cdfhl;64][bfghl;64][cdghl;64][bfgjl;63][bdgjl;63][cfgjl;63][bcgjl;63][cdgjl;63][dfgjl;63][cdfjl;63][bcfjl;6 3][acdfg;62][deghl;61][befhl;61][efghl;61][bdehl;61][bchjl;61][acdef;60][cehjl;60][eghjl; 60][acdeg;59][acefg;59][acdeh;58][acefh;58][acegh;58][abghj;58][abfhj;58][bdejl;57][be fjl;57][defjl;57][bcdef;57][dfghl;57][bdfhl;57][adefg;56][bcdeg;56][bdefg;56][bcefg;56][acfgh;55][acdfh;55][acdgh;55][cdhjl;53][defhl;53][bdhjl;53][bcdhj;53][befgh;52][adefh;5 2][aefgh;52][bdegh;52][bcefh;52][bcegh;52][adegh;52][bcdeh;52][bdfjl;52][bcdfg;52][be dej;52][adefj;52][befgj;52][adegj;52][acegj;52][acefj;52][bdegj;52][bcefj;52][bcegj;52][a cdej;52][aefgj;52][cfhjl;50][cghjl;50][bghjl;50][dehjl;50][dghjl;50][efhjl;50][adfgh;50][fg hjl;50][bcehj;50][beghj;50][behjl;50][acdgj;47][acfgj;47][acdfj;47][adfgj;47][bdefh;47][a cdhj;46][bcfgh;44][bcdfh;44][bcdgh;44][bdfgh;44][bdfgj;42][bcfgj;42][bcdgj;42][bdefj;4 2][bcdfj;42][aeghj;41][adehj;41][bfghj;41][bdehj;41][bcfhj;41][bcghj;41][bdghj;41][befhj;41][aefhj;41][acehj;41][dfhjl;40][bfhjl;40][acfhj;33][bdfhj;33][adghj;33][adfhj;33][afghj;33][acghj;33][cdefh;29][cefgh;29][cdegh;29][cefgj;28][cdefj;28][cdegj;28][cdefg;28][ce fhj;25][ceghj;25][cdehj;25][defgj;23][cdfgh;22][cdfgj;19][defgh;17][efghj;16][cdghj;16][cdfhj;16][cfghj;16][deghj;16][defhj;8][dfghj;8].

[0325] The combinations with “at least 2 phage % coverage” are provided herein below. The phage combinations are ordered in descending performance grade.

[0326] Thus, for example, in the case of [abcdl;78], when CF1_20NOV10, CF1_20Dec107, CF1_20Dec110, CF1_20Oct199 and CF1_21Oct114 are used in a combination, 78% of the bacterial strains tested were targeted by at least 2 of the 5 phage. The combinations are:

[0327] [abcdl;78][abchl;68][abcfl;64][abdhl;64][abcgl;63][abcel;60][abdgl;60][abfgl;60][abcjl;59][acdhl;57][bcdhl;57][abdfl;55][abegl;55][abcdh;52][abgjl;52][abdjl;51][abdel;50][abefl;50][acdjl;48][acdfl;47][adfgl;45][acdgl;45][bcdgl;45][acfgl;45][bcfgl;45][bcegl;4 4][abfjl;42][abejl;42][bcdfl;41][bcdel;39][acdel;39][acefl;39][bcefl;39][abcdf;39][abhjl;3 8][abcfg;37][abcdg;37][aefgl;37][acegl;37][adegl;37][bcdjl;37][aegjl;36][afgjl;36][acgjl; 36][adgjl;36][bcgjl;36][acejl;36][acfjl;36][bdfgl;36][abghl;35][abdfg;35][abcdj;34][befgl; 33][abcde;33][abchj;33][abcef;33][bdegl;33][bdefl;32][begjl;31][bcejl;31][bdejl;31][befjl;31][abceg;31][acehl;30][bcehl;30][abehl;30][aeghl;30][bcdfg;30][abceh;29][bcghl;28][a defl;28][acfhl;28][adghl;28][abfhl;28][acghl;28][afghl;28][abdeg;28][abefg;28][acdfg;27][cdfgl;27][acdhj;26][abdhj;26][adfjl;26][adejl;26][bfgjl;26][aefjl;26][bdgjl;26][bdfjl;26][bcfjl;26][abdef;24][acegj;23][acdej;23][abegj;23][abcej;23][acefj;23][abegh;23][bcegh;2 3][bdhjl;23][befhl;23][bchjl;23][beghl;23][ceghl;23][adehl;23][achjl;23][bdehl;23][aefhl; 23][abcfh;22][cefgl;22][abcgh;22][cdegl;22][adfhl;21][bcfhl;21][acdef;21][cegjl;21][bed hj;20][aghjl;20][bghjl;20][bfhjl;20][cghjl;20][behjl;20][abcfj;19][bcdgj;19][abfgj;19][aef gj;19][adegj;19][acdgj;19][acfgj;19][abdgj;19][abcgj;19][bcegj;19][acdfj;19][bcfgj;19][b cefg;18][bcdeg;18][acdeg;18][acefg;18][bcefh;17][acdeh;17][abdeh;17][abefh;17][bcdeh; 17][acefh;17][acegh;17][bcfgh;16][acghj;16][abfgh;16][bcdgh;16][abdgh;16][abghj;16][b cghj;16][acfhj;16][acehj;16][cfgjl;15][cdgjl;15][cefhl;15][adhjl;15][cdehl;15][bcdef;15][b dghl;14][abefj;14][abdej;14][bfghl;14][adfgj;14][cfghl;14][cdghl;14][cdefl;14][bdfh;14][adefg;12][adegh;11][aefgh;11][cefgh;11][cdegh;11][acdfh;11][bcdfh;11][abdfh;11][acfgh;11][acdgh;11][cdejl;10][cefjl;10][afhjl;10][aehjl;10][cfhjl;10][cehjl;10][bcdfj;9][cdegj;9][adefj;9][bcefj;9][abdfj;9][cdfgj;9][cefgj;9][bcdej;9][cdefg;9][bcehj;8][ceghj;8][cfghj;8][abfhj;8][abehj;8][cdghj;8][bcfhj;8][adghj;8][afghj;8][aeghj;8][efghl;7][cdhjl;7][deghl;7][defhl;7][cdfhl;7][befgh;5][bdefh;5][adefh;5][bdegh;5][cdefh;5][defgh;5][adfgh;5][cdfgh; 5][defjl;5][cdfjl;5][efgjl;5][degjl;5][bdegj;4][befgj;4][bdefj;4][bdfgj;4][defgl;3][bdefg;3].

[0328] The combinations with “at least 3 phage % coverage” are provided herein below. The phage combinations are ordered in descending performance grade.

[0329] Thus, for example, in the case of [abcdl;47], when CF1_20NOV10, CF1_20Dec107, CF1_20Dec110, CF1_20Oct199 and CF1_21Oct114 are used in a combination, 47% of the bacterial strains tested were targeted by at least 3 of the 5 phage. The combinations are:

[0330] [abcdl;47][abchl;44][abdhl;39][acdhl;39][bcdhl;35][abcdh;32][abcdg;27][abcgl;2 7][abcfl;26][abcfg;25][abcdf;24][acdgl;24][acfgl;24][abdfl;23][acegl;22][abcel;21][abfgl; 21][bcdgl;21][abdgl;21][bcfgl;21][acdfl;20][bcdfl;20][acdfg;20][abcgj;19][abegl;18][abef l;17][abdel;17][abdfg;17][abcdj;17][abejl;15][acgjl;15][abceg;15][bcdfg;15][abdjl;14][ab cjl;14][acdel;14][acghl;14][acefl;14][abchj;13][abcde;12][bdfgl;12][abcef;12][cdfgl;12][a bcgh;11][bcegl;11][bcefl;10][bcdel;10][acejl;10][abfjl;10][abgjl;10][acdgj;9][abcfj;9][abc ej;9][acfgj;9][acegj;9][acdeg;9][acefg;9][adfgl;9][acghj;8][bcehl;7][abehl;7][achjl;7][bchj l;7][acehl;7][abhjl;7][acdjl;7][bcfhl;7][bcghl;7][adefl;7][abghl;7][acfhl;7][abfhl;7][abdhj; 6][acegh;5][abceh;5][acfgh;5][acdgh;5][abcfh;5][acfjl;5][bcgjl;5][aefjl;5][adejl;5][aegjl;5][bcejl;5][bcfjl;5][abfgj;4][abegj;4][abdej;4][abdfj;4][abdgj;4][abefj;4][bcdjl;3][adegl;3][aefgl;3][cdefl;3][bdefl;3][abdeg;3][bcefg;3][bcdeg;3][abefg;3][bcdef;3][abdef;3][acdef;3]

[0331] The combinations with the highest “at least 4 phage % coverage” are provided herein below. The phage combinations are ordered in descending performance grade.

[0332] Thus, for example, in the case of [abcdl;30], when CF1_20NOV10, CF1_20Dec107, CF1_20Dec110, CF1_20Oct199 and CF1_21Oct114 are used in a combination, 30% of the bacterial strains analyzed were targeted by at least 4 of the 5 phage. The combinations are:

[0333] [abcdl;30][abchl;27][abdhl;25][bcdhl;25][acdhl;25][abcdh;23][abcgl;18][abcfl;14][abcel;10][abcdg;10][acdgl;9][bcfgl;9][bcdfl;8][abcfg;7][bcdfg;7][abdgl;6][acfgl;6][abfgl;6][bcdgl;6][cdfgl;6][acdfl;5][abcdf;4][abcjl;3][abefl;3][acdel;3][cdefl;3][acefl;3][bdefl;3][adefl;3][abdel;3][bcdel;3][bcefl;3][abceg;3][bdfgl;3][adfgl;3][acdef;3][abcde;3][bcdef;3][abdef;3][abcef;3][abdfl;2][acdfg;2].

### Example 3 Phage Combinations Selected According to Host Coverage as Classified by Bacterial MLST

[0334] For this example, the particular phages are referred to by the single letter designation in Table 1, herein above.

### 2 Phage Combinations

[0335] 2 phage combinations were analyzed in silico for their ability to lyse the 85 different strains of Pseudomonas aeruginosa bacteria as classified by MLST, based on the ability of the single phage to lyse a bacteria of a particular MLST as assessed by a solid media assay.

[0336] The combinations and % of bacterial MLSTs are provided herein below. This trait is referred to as “at least 1 phage % coverage.” The number following each combination refers to the Percent trait performance—in this case the percent of bacteria MLSTs that are targeted by the phage combination. The combinations are listed in descending performance grade. The combinations are:

[0337] [bl;91][al;89][dl;87][cl;85][ab;85][gl;78][ad;77][ac;77][el;76][ah;76][bh;76][bc;7 5][hl;75][fl;73][ag;72][bd;68][af;68][be;66][aj;66][ae;66][cd;64][ch;61][jl;60][dh;57][bf; 56][bg;56][ce;55][cf;48][cg;48][bj;40][gh;40][eg;38][eh;37][fg;36][dg;36][fh;30][de;27][cj;26][df;24][ef;22][dj;20][ej;20][gj;20].

[0338] The percent of host bacterial MLSTs that are infected by two phages of a phage combination are provided. This trait is referred to as “at least 2 phage % coverage.” The phage combinations are ordered in descending performance grade. The combinations are:

[0339] [al;50][bl;47][hl;45][bc;42][ab;40][bd;40][cl;39][ch;38][ac;33][ah;33][cd;29][dl;2 9][bh;28][cg;28][bg;28][ad;24][dh;23][ae;22][ag;20][el;17][gl;17][dg;16][eh;12][bf;12][c f;12][df;12][gh;10][fh;10][fl;8][af;8][de;5][ef;5][be;5][ce;5][fg;4].

### 3 Phage Combinations

[0340] 3 phage combinations were analyzed in silico for their ability to lyse the 85 different strains of Pseudomonas aeruginosa bacteria as classified by MLST, based on the ability of the single phage to lyse a bacteria of a particular MLST as assessed by a solid media assay.

[0341] The combinations and % of bacterial MLSTs are provided herein below. This trait is referred to as “at least 1 phage % coverage.” The number following each combination refers to the Percent trait performance—in this case the percent of bacteria MLSTs that are targeted by the phage combination. The combinations are listed in descending performance grade. The combinations are:

[0342] [abl;97][adl;97][acl;95][afl;95][bhl;95][bel;94][cel;94][ael;94][bcl;93][bdl;93][ajl; 93][cdl;91][agl;91][abc;90][ahl;90][egl;88][abg;88][abf;88][ehl;87][abd;87][acd;87][bfl;8 6][cgl;86][cfl;86][bgl;86][abh;85][dhl;85][chl;85][abe;83][dgl;82][fgl;82][del;82][adh;80][ach;80][ejl;80][fhl;80][acg;80][djl;80][ghl;80][bjl;80][abj;80][gjl;80][acf;80][dfl;78][efl;76][bch;76][bdh;76][adf;76][afg;76][adg;76][bcd;75][beh;75][cjl;73][adj;73][acj;73][bce;72][ace;72][afh;70][agh;70][fjl;70][aeg;66][cdh;66][bef;66][beg;66][aef;66][ade;66][bde;66][aeh;62][ceh;62][aej;60][hjl;60][bgh;60][afj;60][agj;60][ahj;60][bcf;60][bcg;60][bej; 60][bfh;60][bdf;56][bdg;56][bfg;56][ceg;55][cef;55][cde;55][bcj;53][egh;50][cgh;50][cfh;50][cfg;48][cdf;48][cdg;48][bdj;46][bgj;40][egj;40][fgh;40][cej;40][dgh;40][bfj;40][bhj; 40][efg;38][deg;38][efh;37][deh;37][dfg;36][cdj;33][dfh;30][dej;30][def;27][ehj;25][ghj; 25][efj;20][fgj;20][cfj;20][cgj;20][chj;20][dgj;20][dfj;10].

[0343] The percent of host bacterial MLSTs that are infected by two phages of a phage combination are provided below. This trait is referred to as “at least 2 phage % coverage.” The phage combinations are ordered in descending performance grade. The combinations are:

[0344] [abl;72][bcl;66][ahl;65][adl;64][acl;64][abh;61][agl;60][bdl;60][bhl;60][bcd;57][a bc;57][abd;57][ach;57][bch;57][chl;55][cdl;54][ael;52][ace;50][dhl;50][abe;50][afl;47][b gl;47][cdh;47][adh;47][bel;47][acd;46][bcf;44][bcg;44][bfl;43][bdh;42][abg;40][ghl;40][acg;40][agh;40][cgl;39][aeg;38][aeh;37][acf;36][abf;36][cfg;36][bfg;36][cdg;36][bdg;36][cel;35][cfl;34][bce;33][ajl;33][adg;32][cgh;30][fhl;30][afh;30][ade;27][abj;26][dgl;26][e hl;25][ceh;25][afg;24][bdf;24][cdf;24][dfg;24][egl;23][ceg;22][beg;22][aef;22][fgl;21][c gj;20][cfh;20][agj;20][aej;20][acj;20][bgh;20][bgj;20][bjl;20][efl;17][del;17][dfl;17][adf; 16][bcj;13][adj;13][cjl;13][bdj;13][cdj;13][beh;12][efh;12][deh;12][egh;12][bde;11][deg; 11][cde;11][ejl;10][dgj;10][dgh;10][fgh;10][dfh;10][bfh;10][gjl;10][def;5][bef;5][efg;5][c ef;5].

[0345] The percent of host bacterial strains (as classified by MLST) that are infected by three phages of a phage combination are provided below. This trait is referred to as “at least 3 phage % coverage.” The phage combinations are ordered in descending performance grade. The combinations are:

[0346] [chl;40][abl;35][ahl;35][bcl;31][acl;31][bhl;30][abc;29][bdl;29][bch;28][ach;28][bcg;28][bcd;27][dhl;25][abd;24][cdh;23][abh;23][bdh;23][cdl;22][adl;20][acd;20][acg;20][abg;20][adh;19][ael;17][cgl;17][bgl;17][cdg;16][bdg;16][agl;13][ehl;12][aeh;12][cdf;12][bdf;12][bcf;12][bgh;10][cgh;10][afh;10][fgh;10][cfh;10][bfh;10][fhl;10][dgh;10][ghl;10][agh;10][dfh;10][dgl;8][bfl;8][dfl;8][afl;8][cfl;8][abf;8][adg;8][adf;8][acf;8][cel;5][efl;5][del;5][bel;5][bef;5][def;5][ade;5][bce;5][aef;5][cde;5][abe;5][bde;5][ace;5][cef;5][fgl;4][dfg;4][cfg;4][afg;4][bfg;4].

### 4 Phage Combinations

[0347] 4 phage combinations were analyzed in silico for their ability to lyse the 85 different strains of Pseudomonas aeruginosa bacteria as classified by MLST, based on the ability of the single phage to lyse a particular MLST as assessed by a solid media assay.

[0348] The combinations and % of bacterial MLSTs are provided herein below. This trait is referred to as “at least 1 phage % coverage.” The number following each combination refers to the Percent trait performance—in this case the percent of MLSTs that are targeted by the phage combination. The combinations are listed in descending performance grade. The combinations are:

[0349] [acfl;100][ahjl;100][adjl;100][abgl;100][cehl;100][abfl;100][acel;100][aejl;100][a bel;100][afjl;100][abdl;100][agjl;100][ehjl;100][acdl;100][acjl;100][behl;100][abcl;100][acgl;100][abhl;100][afgl;95][adfl;95][adgl;95][adhl;95][achl;95][bchl;95][bdhl;95][adel;9 4][bdel;94][aefl;94][aegl;94][cefl;94][cdel;94][bcel;94][begl;94][befl;94][cegl;94][bcdl;9 3][abjl;93][abcd;90][bejl;90][cfhl;90][aghl;90][cghl;90][cejl;90][afhl;90][bfhl;90][egjl;90][cdhl;90][bghl;90][dejl;90][efgl;88][degl;88][abfg;88][abdg;88][abdf;88][abcg;88][abcf; 88][aehl;87][eghl;87][efhl;87][deh;87][cdg;86][bfg;86][cfg;86][cdfl;86][bcfl;86][bdfl; 86][bcgl;86][bdgl;86][abdj;86][abcj;86][bdjl;86][bcjl;86][abdh;85][abch;85][acdh;85][ab eg;83][abef;83][abde;83][abce;83][dfg;82][defl;82][bhj;80][bfjl;80][bgjl;80][acfg;80][c gjl;80][fghl;80][acgh;80][dgjl;80][efjl;80][dghl;80][dfjl;80][dfhl;80][acdg;80][acdf;80][a bej;80][fgjl;80][cfjl;80][abgj;80][abgh;80][abfj;80][abfh;80][acfh;80][cdjl;80][bcdh;76][a dfg;76][begh;75][befh;75][fhjl;75][ghjl;75][bceh;75][abeh;75][aceh;75][bdeh;75][acdj;73][aceg;72][bcef;72][bceg;72][bcde;72][acef;72][acde;72][afgh;70][adfh;70][adgh;70][bef g;66][bdeg;66][adef;66][adeg;66][aefg;66][bdef;66][cegh;62][aegh;62][aefh;62][cdeh;62][cefh;62][adeh;62][adfj;60][afgj;60][chjl;60][adgj;60][adhj;60][achj;60][acgj;60][aefj;60][dhjl;60][aegj;60][acfj;60][acej;60][abhj;60][adej;60][bdfh;60][bcgh;60][begj;60][bfgh;6 0][befj;60][bcfg;60][bcfh;60][bcdg;60][bdej;60][bcdf;60][bcej;60][bdgh;60][bdfg;56][cef g;55][cdeg;55][cdef;55][bcdj;53][cehj;50][eghj;50][afhj;50][aghj;50][degh;50][cdgh;50][cdfh;50][behj;50][efgh;50][aehj;50][cfgh;50][cdfg;48][bcgj;40][efgj;40][dfgh;40][bcfj;40][cegj;40][bfgj;40][bchj;40][degj;40][bdhj;40][cdej;40][bdgj;40][bdfj;40][cefj;40][defg;3 8][defh;37][defj;30][efhj;25][fghj;25][bfhj;25][dghj;25][dehj;25][bghj;25][cghj;25][cfhj; 25][dfgj;20][cfgj;20][cdfj;20][cdgj;20][cdhj;20].

[0350] The percent of host MLSTs that are infected by two phages of a phage combination are provided below. This trait is referred to as “at least 2 phage % coverage.” The phage combinations are ordered in descending performance grade. The combinations are:

[0351] [abcl;81][abdl;79][abel;76][acdl;75][bcdl;75][abhl;75][abfl;73][abch;71][bcel;70][adhl;70][achl;70][bdhl;70][bchl;70][abgl;69][abcd;68][abjl;66][abdh;66][acfl;65][acel;6 4][aegl;64][abeh;62][aehl;62][bcdh;61][abce;61][adfl;60][adgl;60][afgl;60][acgl;60][bcgl;60][bcfl;60][aghl;60][cdhl;60][afhl;60][adel;58][begl;58][acdh;57][aefl;52][bdel;52][bdg l;52][bfgl;52][abcf;52][abcg;52][bghl;50][bfhl;50][bceh;50][aegh;50][behl;50][abeg;50][acde;50][abgh;50][abde;50][abef;50][acef;50][aceg;50][abfh;50][aceh;50][bdfl;47][befl;4 7][cegl;47][adjl;46][bcdg;44][bcdf;44][abdg;44][bcfg;44][abfg;44][acdg;44][acdf;44][acf g;44][abdf;44][cfgl;43][cdgl;43][cdel;41][bcfh;40][abej;40][bcgh;40][agjl;40][acjl;40][dg hl;40][cfhl;40][adgh;40][afgh;40][aejl;40][bgjl;40][acgh;40][abhj;40][acej;40][cghl;40][f ghl;40][bejl;40][acfh;40][aegj;40][cdfl;39][aefg;38][adeg;38][cegh;37][cehl;37][aefh;37][eghl;37][adeh;37][adfg;36][bdfg;36][cdfg;36][cefl;35][bceg;33][abcj;33][bdjl;33][bcjl;33][acdj;33][bcde;33][bcef;33][dfgl;30][bfjl;30][dfhl;30][cdgh;30][cfgh;30][afjl;30][adfh;3 0][adej;30][degl;29][adef;27][cdjl;26][abdj;26][bcdj;26][cefh;25][cdeh;25][cghj;25][bghj:25][efhl;25][dehl;25][ghjl;25][aehj;25][begh;25][aghj;25][efgl;23][bdeg;22][cefg;22][be fg;22][cdeg;22][bcej;20][bchj;20][bcgj;20][bcfj;20][cegj;20][bfgh;20][ahjl;20][cgjl;20][c fgj;20][chjl;20][afgj;20][bfgj;20][cejl;20][adgj;20][aefj;20][abgj;20][cdgj;20][achj;20][ac gj;20][dgjl;20][cdfh;20][bdgh;20][bdgj;20][abfj;20][egjl;20][acfj;20][bhjl;20][begj;20][d efl;17][degh;12][befh;12][efgh;12][bdeh;12][defh;12][defg;11][bdef;11][cdef;11][bdfj;10][dfgh;10][fgjl;10][efjl;10][cdej;10][cdfj;10][bdfh;10][adfj;10][dfgj;10][cfjl;10][dejl;10][degj;10][bdej;10].

[0352] The percent of host bacterial strains (as classified by MLST) that are infected by three phages of a phage combination are provided below. This trait is referred to as “at least 3 phage % coverage.” The phage combinations are ordered in descending performance grade. The combinations are:

[0353] [abhl;55][achl;55][abcl;50][bchl;50][abdl;50][abch;47][adhl;45][cdhl;45][bcdl;43][acdh;42][acdl;41][abcd;40][aghl;40][acgl;39][abgl;39][abdh;38][bcdh;38][bcfg;36][abcg;36][bcdg;36][acel;35][abel;35][bdhl;35][bcgl;34][abdg;32][abcf;32][acdg;32][bcfl;30][af hl;30][acgh;30][cghl;30][abce;27][abfl;26][acfl;26][bdgl;26][adgl;26][cdgl;26][cehl;25][a ceh;25][aehl;25][acfg;24][cdfg;24][abfg;24][bdfg;24][bcdf;24][aegl;23][aceg;22][bceg;2 2][abeg;22][cfgl;21][bfgl;21][bcgj;20][cfhl;20][bghl;20][abgj;20][acgj;20][bcgh;20][acfh;20][abgh;20][adel;17][bcel;17][aefl;17][bdfl;17][afgl;17][cdfl;17][acdf;16][abdf;16][abd j;13][abcj;13][acjl;13][dfgl;13][behl;12][eghl;12][adeh;12][dehl;12][aegh;12][aefh;12][ef hl;12][abeh;12][adfg;12][begl;11][cegl;11][cdeg;11][adeg;11][abde;11][bcde;11][bdeg;1 1][acde;11][bdfh;10][cfgh;10][abfh;10][bdgh;10][bdgj;10][dghl;10][bgjl;10][fghl;10][bfh l;10][bfgh;10][cdfh;10][dfhl;10][aejl;10][cdgj;10][afgh;10][agjl;10][adgj;10][adgh;10][ad fh;10][cgjl;10][dfgh;10][cdgh;10][bcfh;10][adfl;8][bcdj;6][bcjl;6][acdj;6][abjl;6][befl;5][cefl;5][cdel;5][bdel;5][defl;5][degl;5][efgl;5][defg;5][cefg;5][cdef;5][bdef;5][bcef;5][aefg;5][abef;5][acef;5][adef;5][befg;5].

[0354] The percent of host bacterial MLSTs that are infected by four phages of a phage combination are provided below. This trait is referred to as “at least 4 phage % coverage.” The phage combinations are ordered in descending performance grade. The combinations are:

[0355] [bchl;30][achl;30][abcl;27][bdhl;25][abhl;25][cdhl;25][abch;23][bcdh;23][bcdl;22][abdl;20][abcd;20][abcg;20][adhl;20][acdh;19][abdh;19][acdl;18][bcgl;17][bcdg;16][abg l;13][acgl;13][aehl;12][bcdf;12][bdfh;10][bdgh;10][bcfh;10][bcgh;10][adfh;10][bghl;10][aghl;10][acgh;10][acfh;10][bfgh;10][afgh;10][adgh;10][bfhl;10][abfh;10][abgh;10][fghl; 10][dghl;10][dfhl;10][dfgh;10][cghl;10][cfhl;10][cfgh;10][afhl;10][cdgh;10][cdfh;10][cd gl;8][adfl;8][abfl;8][bdfl;8][bcfl;8][bdgl;8][acfl;8][cdfl;8][acdg;8][acdf;8][abdg;8][abdf;8 ][abcf;8][bcel;5][acel;5][aefl;5][befl;5][defl;5][abel;5][cdel;5][adel;5][bdel;5][cefl;5][bce f;5][abce;5][bcde;5][cdef;5][bdef;5][acef;5][adef;5][acde;5][abef;5][abde;5][afgl;4][dfgl; 4][adgl;4][cfgl;4][bfgl;4][bcfg;4][adfg;4][cdfg;4][bdfg;4][abfg;4][acfg;4].

### 5 Phage Combinations

[0356] 5 phage combinations were analyzed in silico for their ability to lyse the 85 different strains of Pseudomonas aeruginosa bacteria as classified by MLST, based on the ability of the single phage to lyse a bacteria of a particular MLST as assessed by a solid media assay.

[0357] The combinations and % of bacterial MLSTs are provided herein below. This trait is referred to as “at least 1 phage % coverage.” The number following each combination refers to the Percent trait performance—in this case the percent of bacteria MLSTs that are targeted by the phage combination. The combinations are listed in descending performance grade. The combinations are:

[0358] [abefl;100][aefjl;100][acghl;100][abhjl;100][abgjl;100][abghl;100][dehjl;100][abf jl;100][abfhl;100][aghjl;100][abfgl;100][acgjl;100][achjl;100][abejl;100][abehl;100][befh l;100][abegl;100][acfjl;100][acfhl;100][acdel;100][acdjl;100][ceghl;100][acejl;100][acefl;100][cehjl;100][cefhl;100][aegjl;100][acdhl;100][afhjl;100][aehjl;100][acdgl;100][beghl; 100][acfgl;100][acdfl;100][afgjl;100][acehl;100][acegl;100][behjl;100][adejl;100][abcgl; 100][efhjl;100][abchl;100][adgjl;100][abcjl;100][abcdl;100][bdehl;100][bcehl;100][abdel;100][cdehl;100][abdfl;100][adhjl;100][abdgl;100][abcel;100][abdhl;100][eghjl;100][adfj l;100][abdjl;100][abcfl;100][adfgl;95][bcdhl;95][cefgl;94][bdefl;94][aefgl;94][bcegl;94][bdegl;94][cdefl;94][cdegl;94][adegl;94][adefl;94][befgl;94][bcdel;94][bcefl;94][adghl;90][cdfhl;90][adfhl;90][cdghl;90][cdejl;90][begjl;90][cefjl;90][bcghl;90][befjl;90][bcfhl;90][bcejl;90][efgjl;90][bdejl;90][bdfhl;90][cegjl;90][bdghl;90][degjl;90][bfghl;90][cfghl;90][afghl;90][defjl;90][defgl;88][abcdf;88][abcdg;88][abcfg;88][abdfg;88][adehl;87][defhl;8 7][efghl;87][aefhl;87][deghl;87][aeghl;87][bdfgl;86][bcdgl;86][bcfgl;86][bcdfl;86][cdfgl; 86][bcdjl;86][abcdj;86][abcdh;85][abcde;83][abdef;83][abcef;83][abefg;83][abceg;83][ab deg;83][bfgjl;80][abdgj;80][abdgh;80][abdfj;80][abdfh;80][abdej;80][abcgj;80][abefj;80][abcgh;80][abcfj;80][abcfh;80][abcej;80][bchjl;80][bcgjl;80][bdfjl;80][bcfjl;80][bdgjl;80][dfghl;80][cdfjl;80][cdgjl;80][acfgh;80][cfgjl;80][acdgh;80][acdfg;80][acdfh;80][abfgj;80][abfgh;80][dfgjl;80][abegj;80][bdhjl;80][bfhjl;75][bdegh;75][cghjl;75][cfhjl;75][bdefh;7 5][dfhjl;75][befgh;75][bghjl;75][dghjl;75][fghjl;75][acdeh;75][bcdeh;75][abceh;75][aceg h;75][abdeh;75][acefh;75][abefh;75][abegh;75][bcegh;75][bcefh;75][bcdeg;72][acefg;72][bcefg;72][bcdef;72][acdeg;72][acdef;72][adfgh;70][adefg;66][bdefg;66][adegh;62][cdef h;62][cdegh;62][adefh;62][aefgh;62][cefgh;62][adefj;60][acdhj;60][cdhjl;60][acfgj;60][a cegj;60][acefj;60][acdgj;60][acdfj;60][acdej;60][abdhj;60][abchj;60][adfgj;60][adegj;60][bcdfh;60][bcdej;60][bcfgh;60][bdefj;60][aefgj;60][bcegj;60][bdegj;60][bcefj;60][bdfgh;6 0][bcdgh;60][bcdfg;60][befgj;60][cdefg;55][abehj;50][ceghj;50][defgh;50][aeghj;50][deg hj;50][efghj;50][bcehj;50][adghj;50][abfhj;50][adfhj;50][cdfgh;50][acehj;50][cdehj;50][c efhj;50][acfhj;50][bdehj;50][aefhj;50][befhj;50][acghj;50][beghj;50][abghj;50][afghj;50][adehj;50][bdfgj;40][bcdhj;40][cdegj;40][defgj;40][bcdgj;40][cdefj;40][cefgj;40][bcfgj;40][bcdfj;40][bfghj;25][cdfhj;25][dfghj;25][defhj;25][bdfhj;25][bdghj;25][bcfhj;25][cfghj;2 5][cdghj;25][beghj;25][cdfgj;20].

[0359] The percent of host bacterial MLSTs that are infected by two phages of a phage combination are provided below. This trait is referred to as “at least 2 phage % coverage.” The phage combinations are ordered in descending performance grade. The combinations are:

[0360] [abcdl;87][abcel;82][abchl;80][abdhl;80][abcgl;78][abcfl;78][abdel;76][abefl;76][abegl;76][abcdh;76][abceh;75][bcdhl;75][abdgl;73][abfgl;73][abdfl;73][bcdel;70][bcefl;7 0][bcegl;70][abejl;70][acdhl;70][abdjl;66][abcjl;66][acfgl;65][acdgl;65][acdfl;65][adfgl;6 5][acegl;64][acefl;64][adegl;64][acdel;64][aefgl;64][aeghl;62][bcehl;62][abefh;62][abehl; 62][acehl;62][aefhl;62][abdeh;62][abegh;62][adehl;62][abcde;61][abcef;61][abceg;61][bc fgl;60][bcdgl;60][bcdfl;60][abgjl;60][bcfhl;60][acfhl;60][acghl;60][bcghl;60][abghl;60][a bfjl;60][abfhl;60][abcgh;60][adfhl;60][adghl;60][afghl;60][abcfh;60][adefl;58][bdegl;58][befgl;58][acdjl;53][bdefl;52][bdfgl;52][abcdf;52][abcfg;52][abcdg;52][abdfh;50][begjl;5 0][bcefh;50][adegh;50][bdfhl;50][bcdeh;50][adejl;50][bfghl;50][bcejl;50][bdghl;50][acde g;50][beghl;50][abfgh;50][aefgh;50][abefg;50][befhl;50][abehj;50][aehjl;50][aeghj;50][a cdef;50][acejl;50][acdeh;50][abdgh;50][bcegh;50][acefg;50][acefh;50][acegh;50][bdehl;5 0][abdeg;50][aegjl;50][acehj;50][abdef;50][bdejl;50][cdegl;47][cefgl;47][bcdjl;46][abdfg;44][acdfg;44][bcdfg;44][cdfgl;43][cdefl;41][bcfjl;40][bcdfh;40][bcdgh;40][bdfjl;40][beg jl;40][afgjl;40][abcdj;40][bcfgh;40][abcej;40][bdgjl;40][abegj;40][aefjl;40][acgjl;40][abd hj;40][cfghl;40][abhjl;40][acdej;40][acdfh;40][acdgh;40][cdghl;40][cdfhl;40][acefj;40][a bdej;40][acegj;40][acfjl;40][acfgh;40][abchj;40][adgjl;40][aefgj;40][adegj;40][abefj;40][bfgjl;40][dfghl;40][befjl;40][adfgh;40][adfjl;40][adefg;38][ceghl;37][cefhl;37][cdegh;37][cefgh;37][cdehl;37][adefh;37][efghl;37][deghl;37][bcdef;33][bcdeg;33][bcefg;33][cdejl; 30][adefj;30][degjl;30][cdfgh;30][cegjl;30][defgl;29][acfhj;25][acghj;25][bcfhj;25][cdefh;25][bfhjl;25][adehj;25][bfghj;25][behjl;25][bghjl;25][abghj;25][cdghj;25][beghj;25][abf hj;25][ceghi;25][cehjl;25][cfghj;25][cfhjl;25][cghjl;25][defhl;25][dghjl;25][eghjl;25][adg hj;25][fghjl;25][bdghj;25][befgh;25][aefhj;25][aghjl;25][bcehj;25][afhjl;25][afghj;25][be ghj;25][bdegh;25][cdefg;22][bdefg;22][bcdgj;20][cefgj;20][bdegj;20][acdfj;20][bcdhj;20][cefjl;20][abfgj;20][adhjl;20][bcefj;20][abdgj;20][cfgjl;20][cdgjl;20][bchjl;20][abdfj;20][bcegj;20][cdhjl;20][acdgj;20][abcgj;20][efgjl;20][befgj;20][adfgj;20][bdhjl;20][achjl;20][bdfgh;20][bcdej;20][bcfgj;20][cdegj;20][bcdfj;20][abcfj;20][cdfjl;20][acdhj;20][dfgjl;20][acfgj;20][cdfgj;20][bdfgj;20][bdefh;12][defgh;12][bdefj;10][cdefj;10][defjl;10][defgj;10].

[0361] The percent of host MLSTs that are infected by three phages of a phage combination are provided below. This trait is referred to as “at least 3 phage % coverage.” The phage combinations are ordered in descending performance grade. The combinations are:

[0362] [abchl;65][acdhl;60][abdhl;60][abcdl;58][bcdhl;55][abcel;52][abghl;50][abfhl;50][abehl;50][abcfl;47][abcdh;47][abegl;47][acegl;47][abcgl;43][abdel;41][acdel;41][abcfg; 40][acfhl;40][afghl;40][abcdg;40][acghl;40][abcdf;40][adghl;40][abdgl;39][abdfl;39][acf gl;39][abfgl;39][bcdgl;39][bcfgl;39][acdfl;39][acdgl;39][acegh;37][abceh;37][acehl;37][c eghl;37][bcehl;37][aeghl;37][bcdfg;36][acdfg;36][abdfg;36][abefl;35][acefl;35][bcdfl;34][cdfgl;30][bdfgl;30][adfhl;30][acfgh;30][abcfh;30][bcghl;30][acdgh;30][bcfhl;30][cdghl; 30][cfghl;30][abcgh;30][adegl;29][bcegl;29][abcde;27][abcef;27][abceg;27][adfgl;26][ad ehl;25][cdehl;25][cefhl;25][bghjl;25][aghjl;25][acefh;25][aefhl;25][acghj;25][bcghj;25][a begh;25][abghj;25][beghl;25][cghjl;25][acdeh;25][bcdel;23][aefgl;23][abdeg;22][abefg;2 2][acdeg;22][acefg;22][bcdeg;22][bcefg;22][bcfgh;20][bcgjl;20][bdghl;20][abcdj;20][bcd gj;20][bchjl;20][adgjl;20][bcdgh;20][bcegj;20][bcfgj;20][abcej;20][abcfj;20][abcgj;20][a bcjl;20][aegjl;20][abchj;20][bdgjl;20][abdgh;20][acegj;20][abejl;20][acejl;20][acfgj;20][a cdjl;20][abdjl;20][bfghl;20][abdgj;20][acgjl;20][abfgh;20][abfgj;20][achjl;20][acdgj;20][cdgjl;20][acdfh;20][abgjl;20][abhjl;20][cdfhl;20][abegj;20][bcefl;17][bdegl;17][adefl;17][cdegl;17][bcdjl;13][efghl;12][abdeh;12][aefgh;12][bcegh;12][adefh;12][deghl;12][befhl; 12][defhl;12][bdehl;12][adegh;12][abefh;12][befgl;11][cefgl;11][cdefg;11][bdefg;11][bc def;11][acdef;11][abdef;11][adefg;11][abdfj;10][adegj;10][bdfgh;10][bdfgj;10][adfgh;10][acdfj;10][bdfhl;10][cfgjl;10][adejl;10][cegjl;10][begjl;10][bdegj;10][acfjl;10][bfgjl;10][b cdfj;10][abfjl;10][cdegj;10][acdej;10][cdfgh;10][adfgj;10][cdfgj;10][bcdfh;10][abdfh;10][bcejl;10][afgjl;10][dfghl;10][aefjl;10][bcfjl;10][abdej;10][bcdej;10][bdefl;5][cdefl;5][def gl;5].

[0363] The percent of host bacterial MLST that are infected by four phages of a phage combination are provided below. This trait is referred to as “at least 4 phage % coverage.” The phage combinations are ordered in descending performance grade. The combinations are:

[0364] [abchl;45][acdhl;40][abcdh;38][abcdl;37][abdhl;35][bcdhl;35][abcgl;34][abcdg;3 2][acghl;30][bcdgl;26][abdgl;26][acdgl;26][acehl;25][bcdfg;24][abcfg;24][abceg;22][abc fl;21][bcfgl;21][acfhl;20][abcgj;20][bcghl;20][abghl;20][abcgh;20][abcel;17][abfgl;17][a cfgl;17][bcdfl;17][abcdf;16][cdfgl;13][bdfgl;13][aefhl;12][aeghl;12][adehl;12][abehl;12][acdfg;12][abdfg;12][abegl;11][bcegl;11][acegl;11][acdeg;11][abcde;11][bcdeg;11][abdeg;11][acfgh;10][cdghl;10][acdfh;10][cdfgh;10][acdgh;10][acdgj;10][cdfhl;10][bcdgj;10][af ghl;10][bcdgh;10][abcfh;10][cfghl;10][bcdfh;10][adfgh;10][dfghl;10][bdfgh;10][bdfhl;10][abdfh;10][bcfgh;10][acgj;10][bdghl;10][abfgh;10][bfghl;10][adghl;10][abfhl;10][bcgjl; 10][abdgj;10][abdgh;10][abgjl;10][bcfhl;10][adfhl;10][adfgl;8][acdfl;8][abdfl;8][abcjl;6][abcdj;6][aefgl;5][adefl;5][adegl;5][bcdel;5][acefl;5][bcefl;5][acdel;5][bdefl;5][bdegl;5][a befl;5][befgl;5][cdefl;5][cdegl;5][abdel;5][cefgl;5][defgl;5][bcefg;5][cdefg;5][bdefg;5][b cdef;5][abcef;5][acefg;5][abdef;5][abefg;5][acdef;5][adefg;5].

### Example 4 Synergism of Phages and Antibiotics

### Materials and Methods

[0365] Synergism with Antibiotic in Liquid Infection

[0366] To test the efficacy of the phage and antibiotics in liquid culture, bacterial host cells were grown overnight in TSB at 37° C. with shaking at 180 rpm to OD600>1.5. In addition, each phage was diluted to a concentration of 5×10\hat{ }7 PFU/ml in TSB and used individually or combined equally with other phages into a cocktail. Then, 1 mM ions were added, and 200 μL was dispensed per well in a 96-well plate to a final concentration of 10∂PFU/well. For no phage control (NPC), TSB containing 1 mM ions was used. Antibiotics was added to the relevant wells (aztreonam 4 μg/mL, colistin 2 μg/mL for “883,” 4 μg/mL for “762” and 6 μg/mL for PAO1). Then, 2 μL of the bacterial culture was added to the wells (dilution of 1:100). TSB containing 1 mM ions was used as NPC. Two repeats were done for each treatment, and TSB media served as a blank. 50 μL of mineral oil added were added to each well to reduce evaporation of the samples, and the plate was covered with a sterile film to allow for bacterial growth and keep the culture sterile. Plates were incubated for approximately 30 hours in a plate reader at 37° C. with shaking, and OD600 was measured every 20 minutes. Two biological repeats were performed for the assay. The results are set forth in FIGS. 3A-3J.

[0367] FIG. 3A presents the growth curves expressed by the OD600 measures for (1) bacterial strain “883” with no treatment, (2) “883” treated with cocktail CFX1, (3) “883” treated with aztreonam, and (4) “883” treated with cocktail CFX1 and aztreonam (Azt). FIG. 3A demonstrates a synergistic reduction of bacterial growth achieved by the cocktail and aztreonam. This effect was also measured with additional bacterial strains.

[0368] FIG. 3B presents the growth curves expressed by the OD600 measures for (1) bacterial strain “883” with no treatment, (2) “883” treated with cocktail CFX1, (3) “883” treated with tobramycin, and (4) “883” treated with cocktail CFX1 and tobramycin. FIG. 3B demonstrates a synergistic reduction of bacterial growth achieved by the cocktail and tobramycin. This effect was also measured with additional bacterial strains.

[0369] FIG. 3C presents the growth curves expressed by the OD600 measures for (1) bacterial strain “883” with no treatment, (2) “883” treated with phage CF1_20Dec110, (3) “883” treated with aztreonam, and (4) “883” treated with phage CF1_20Dec110 and aztreonam. FIG. 3C demonstrates a synergistic reduction of bacterial growth achieved by CF1_20Dec110 and aztreonam. This effect was also measured with additional bacterial strains.

[0370] FIG. 3D presents the growth curves expressed by the OD600 measures for (1) bacterial strain “762” with no treatment, (2) “762” treated with phage CF1_20Nov10, (3) “762” treated with aztreonam, and (4) “762” treated with phage CF1_20Nov10 and aztreonam. FIG. 3D demonstrates a synergistic reduction of bacterial growth achieved by CF1_20Nov10 and aztreonam. This effect was also measured with additional bacterial strains.

[0371] FIG. 3E presents the growth curves expressed by the OD600 measures for (1) bacterial strain “762” with no treatment, (2) “762” treated with phage CF1_20Dec107, (3) “762” treated with aztreonam, and (4) “762” treated with phage CF1_20Dec107 and aztreonam. FIG. 3E demonstrates a synergistic reduction of bacterial growth achieved by CF1_20Dec107 and aztreonam. This effect was also measured with additional bacterial strains.

[0372] FIG. 3F presents the growth curves expressed by the OD600 measures for (1) bacterial strain “PAO1” with no treatment, (2) “PAO1” treated with cocktail CFX1, (3) “PAO1” treated with colistin, and (4) “PAO1” treated with cocktail CFX1 and colistin. FIG. 3F demonstrates a synergistic reduction of bacterial growth achieved by the cocktail and colistin. This effect was also measured with additional bacterial strains.

[0373] FIG. 3G presents the growth curves expressed by the OD600 measures for (1) bacterial strain “PAO1” with no treatment, (2) “PAO1” treated with cocktail CFX1, (3) “PAO1” treated with aztreonam, and (4) “PAO1” treated with cocktail CFX1 and aztreonam. FIG. 3G demonstrates a synergistic reduction of bacterial growth achieved by the cocktail and aztreonam. This effect was also measured with additional bacterial strains.

[0374] FIG. 3H presents the growth curves expressed by the OD600 measures for (1) bacterial strain “PAO1” with no treatment, (2) “PAO1” treated with phage CF1_20Nov10, (3) “PAO1” treated with colistin, and (4) “PAO1” treated with phage CF1_20Nov10 and colistin. FIG. 3H demonstrates a synergistic reduction of bacterial growth achieved by CF1_20Nov10 and colistin. This effect was also measured with additional bacterial strains.

[0375] FIG. 3I presents the growth curves expressed by the OD600 measures for (1) bacterial strain “PAO1” with no treatment, (2) “PAO1” treated with phage CF1_20Dec107, (3) “PAO1” treated with colistin, and (4) “PAO1” treated with phage CF1_20Dec107 and colistin. FIG. 3I demonstrates a synergistic reduction of bacterial growth achieved by CF1_20Dec107 and colistin. This effect was also measured with additional bacterial strains.

[0376] FIG. 3J presents the growth curves expressed by the OD600 measures for (1) bacterial strain “PAO1” with no treatment, (2) “PAO1” treated with phage CF1_20Dec110, (3) “PAO1” treated with colistin, and (4) “PAO1” treated with phage CF1_20Dec110 and colistin. FIG. 3J demonstrates a synergistic reduction of bacterial growth achieved by CF1_20Dec110 and colistin. This effect was also measured with additional bacterial strains.

[0377] In summary, exposure of the PsA strains to the phage cocktail CFX1 alone suppressed growth for 13-15 hours while exposure to aztreonam alone causes slower bacterial growth throughout the observed period. When bacterial strains (e.g., PAO1, 883) are exposed to CFX1 and aztreonam together the appearance of bacteria mutants was essentially obliviated (this synergism effect was also verified with other clinical isolates). In the case of Tobramycin, exposure of the PsA strains to the phage cocktail CFX1 alone suppressed growth for 13-15 hours, (like with aztreonam) while exposure to Tobramycin alone suppressed growth for approximately 25 hours. When bacterial strains (e.g., PAO1, 883) are exposed to CFX1 and aztreonam together the appearance of bacteria mutants was essentially obliviated (this synergism effect was also verified with other clinical isolates). A similar synergic effect of CFX1 and antibiotics was observed in the case of colistin. The synergistic effect was also observed for some of the individual phage members of CFX1 when combined with the various antibiotics and therefore is also expected in the case of Azithromycin and other antibiotics used against lung infections in general and with CF patients in particular.

### Example 5 Efficacy in Biofilm

### Materials and Methods: Growing Biofilm and Treatment

[0378] To test the effect of phage on biofilm, starters of the relevant bacteria were grown overnight. Three isolated single colonies of the relevant strains were picked into 3 mL TSB and shook overnight at 37° C., 180 rpm, to an OD₆₀₀>1, one starter used for each of two biological repeats. The next day, the starters were dispersed in 96 wells plate and the biofilm was left to form for 24 hours: cultures were diluted 1:100 in 3 mL fresh TSB (Tryptic Soy Broth) medium and OD₆₀₀ was adjusted to ˜0.05 (˜4×10⁷ CFU/mL). 200 μL of the diluted inoculums were added per well in a 96 well culture plate (Biofil, cat #TCP-011-096) according to the plate layout. 200 μL TSB was used for blank wells. The microtiter plates were incubated at 37° C. for 24 hours, with low shaking frequency of 110 rpm. Then the supernatant (containing media, waste, and planktonic cells) was carefully removed, and wells, with the P. aeruginosa biofilm, were washed once with 200 μL PBS (Phosphate-buffered saline, Hylabs, cat #BP655). Then, the desired treatments were added and the 96 well plate was returned to the 37° C. shaker (110 rpm) for 6 hours. 200 μL of fresh media/treatment was added according to the plate layout. Treatment was either with 2.5×10⁷ PFU/well 3-phage cocktail CFX1 (as detailed in table 1) (at 1:1:1 ration) or the antibiotic imipenem (SIGMAC cat #C3809-1G) at 5- or 50-fold the minimal inhibitory concentration (MIC) of P. aeruginosa (4 μg/mL). TSB medium served as no treatment control. After the incubation period, the supernatant was carefully removed (media, waste, phages/antibiotics, and planktonic cells) the biofilm was washed again with 200 μL PBS (Phosphate-buffered saline, Hylabs, cat #BP655) and its biomass measured (staining with crystal violet (CV) and/or viable cells (plating for CFU enumeration).

### Assessment of the Phage Effect on Pre-Formed P. aeruginosa Biofilm Biomass by Crystal Violet Staining Assay

### Materials and Methods: Crystal Violet (CV) Staining Assay

[0379] For biomass assessment, crystal violet (CV), that stains DNA, live/dead bacterial cells, and the extracellular matrix was used.

[0380] Following the last step in the above-described procedure (“growing Biofilm and treatment”), 200 μL 0.1% crystal violet (Acros, cat #447570500) was added to each well of the microtiter plate. Following incubation at room temperature for 10-15 minutes, the plate was rinsed 3 three times with PBS. The microtiter plate was placed in the hood, upside down to dry for few hours or overnight. 200 μL of 70% ethanol was added to each well of the microtiter plate to solubilize the CV and the solution was transferred to a new flat bottomed microtiter dish. 70% ethanol was used as the blank. Plates were photographed and biofilm biomass quantification was done by measuring the absorbance of the CV stain in a plate reader, at OD₆₁₅. CV staining assay was performed in two biological repeats each with 6 technical repeats.

[0381] To assess the biofilm penetration, bacteria were grown in conditions allowing biofilm formation, and 24 h later CFX1 (as detailed in table 1) phage cocktail sample was added for 6 hours. Then, the biofilm mass was stained with crystal violet (FIG. 4A). Statistical analysis was performed using two-way ANOVA test for detection of significant differences between treatments. The biofilm's biomass produced by P. aeruginosa can be clearly visualized by the relatively dark purple color in the leftmost three wells on FIG. 4A, with no treatment, following CV staining. After phage cocktail treatment, a clear reduction in the pre-formed biofilm biomass was evident by the lighter purple color of the three wells on the right. These results indicated that phage cocktail was able to reduce the biofilm biomass.

### Assessment of Phage Effect on Viability of P. aeruginosa Embedded in Pre-Formed Biofilm

### Materials and Methods—Viability of P. aeruginosa in Pre-Formed Biofilm

[0382] For host cells viability assessment, the BacTiter-Glo (Promega, cat #G8231) method was used. The method measures viable bacterial cells based on quantification of the ATP present in the viable cells. The readout is a luminescent signal (in relative light units (RLU)) in an ATP-dependent reaction.

[0383] First, a calibration curve was established, to correlate the BacTiter-Glo assay results expressed in RLU with the viability assay results that is expressed in colony forming unites (CFU). A calibration curve, specific to P. aeruginosa, was established. This part was done on a planktonic culture: overnight culture in TSB was normalized to OD₆₀₀ of 1.3 and a series of ten-fold serial dilutions were prepared (10⁰ to 10⁻⁵). 200 μL from each dilution was dispersed per well, in a 96 well plate. The 96 well plate was centrifuged at 2272×g, 10 min at 4° C. and the pellet was resuspended in 100 μL PBS. 100 μL of BacTiter-Glo Reagent was added to each well of the 96-well plate and mixed well. Following incubation for 5 minutes at room temperature, RLU was measured in the luminometer. In parallel, 5 μL of the ten-fold serial dilutions were spotted on BHIS plates for CFU enumeration. Plotting RLU vs CFU showed good correlation (R²=0.962) from 1×10⁹ to 1×10⁵ RLU. The trendline equation was used in the experiments to convert RLU to calculated CFU (cCFU).

[0384] Following the last step in the above-described procedure (“growing Biofilm and treatment”), the plate was left to dry for 15 min at room temperature. 100 μL PBS+100 μL of BacTiter-Glo Reagent were added to each well of the 96 white well plates and incubated at RT. Following 5 minutes incubation, with low shaking frequency of 110 rpm, the lid was removed, and the plate was placed in a spark device (BiomX ID #186). Luminescent signal was measured using 1000 milliseconds integration time, in relative light units (RLU). Using the calibration curve equation, RLU were converted to cCFU.

[0385] The results are set forth in FIG. 4B. The results reveal that the CFX1 phages were able to penetrate biofilm and reduce bacterial burden of embedded PsA (˜2.5 logs), this reduction was greater than that obtained by antibiotic treatment of biofilm produced by an antibiotic sensitive PsA strain (˜1 log). The significant reduction by phage is also corroborated as a visible decrease in biofilm by staining with crystal violet, which stains DNA of dead bacterial cells and the extracellular matrix.

### Example 6 Phage Viability Following Prolong Storage

### Materials and Methods: Stability Assay

[0386] Phage viability following storage in different condition was measured by testing potency of each one of the phages at different temperature conditions (5° C., 25° C., 37° C.), time periods (1, 2, 4 and 8 weeks) and the following compositions:

| Buffer No. | Buffer composition |
|---|---|
| 1 | 10 mM Tris, 135 mM NaCl, 20 mM MgSO4, |
| | 0.02% Tween-80, pH 7.4 ± 0.2 |
| 2 | 10 mM Tris, 150 mM NaCl, 0.02% Tween-80, |
| | pH 7.4 ± 0.2 |
| 3 | 10 mM Tris, 155 mM NaCl, pH 7.4 ± 0.2 |

[0387] Phage titers for each experimental block were determined by spot drop plaque assay as follows: host culture was prepared by inoculating 4 mL liquid BHIS with 5-10 colonies of the host and incubating at 37° C., until OD600 was 1.5 (overnight). 150 p L of host culture were added to 4 mL of molten top agar (BHIS top agar: BHIS media, 0.4% Agarose) with divalent ions Mn²⁺, Ca²⁺ and Mg²⁺ and dispensed on BHIS agar plats (1.5% Agarose). Plate were left to solidify for 15 min at RT. Then dilutions of phage sample were dropped (5 μL). Plates were incubated overnight before counting plaques (10-50 plaques/drop) and determination of phage titer (number of plaques×200×reciprocal of counted dilution=PFU/mL). Phage titer at each time period was compared to titer at zero time and the corresponding log difference calculated. Results are presented in table 4 below.

TABLE 4

| | Temperature, | time, | Log difference from time 0 * | | |
|---|---|---|---|---|---|
| Phage | ° C. | weeks | Buffer 1 | Buffer 2 | Buffer 3 |
| CF1_20DEC107 | 5 | 2 | 0.19 | 0.19 | −0.42 |
| | | 4 | 0.16 | 0.35 | −0.07 |
| | 25 | 2 | −0.02 | 0.16 | −0.46 |
| | | 4 | 0.39 | 0.34 | −0.13 |
| | 37 | 1 | −0.10 | 0.10 | −0.16 |
| | | 2 | −0.81 | 0.21 | 0.35 |
| | | 4 | −0.52 | 0.60 | −0.79 |
| CF1_20NOV10 | 5 | 1 | −0.38 | −0.40 | NA |
| | | 2 | −0.19 | −0.25 | |
| | | 4 | −0.01 | −0.26 | |
| | | 8 | −0.22 | −0.39 | |
| | 25 | 1 | −0.38 | −0.61 | |
| | | 2 | −0.54 | −0.30 | |
| | | 4 | −0.22 | −0.39 | |
| | 37 | 1 | −0.59 | −0.61 | |
| | | 2 | −1.07 | −0.26 | |
| | | 4 | −0.89 | −0.51 | |
| CF1_20Dec110 | 5 | 1 | −0.08 | −0.35 | −2.02 |
| | | 2 | 0.03 | −0.48 | −2.03 |
| | 25 | 1 | −0.03 | −0.10 | −0.71 |
| | | 2 | −0.17 | −0.05 | −0.21 |
| | 37 | 1 | −0.12 | −0.58 | −0.68 |
| | | 2 | −0.20 | −0.63 | −1.51 |

* The average potency at time zero of each phage was 7.43E+09 PFU/ml.

### Example 7

### Essential Genes for the Phage Lytic Cycle

### Materials and Methods: Gene Analysis

[0388] According to certain embodiments, the phages' genomes are reduced in order to create synthetic phages with smaller genomes without a significant hamper of their essential functionality (e.g. the ability to infect and lyse a host bacteria). According to certain embodiments, such a reduced genome can then more readily accommodate a heterogenous molecule of DNA that otherwise, if added to the original full genomic DNA may be challenging due to the limited DNA encapsulation capacity of a phage (see for example Pires, D. P., Monteiro, R., Mil-Homens, D. et al. Designing P. aeruginosa synthetic phages with reduced genomes. Sci Rep 11, 2164 (2021). doi(dot)org/10.1038/s41598-021-81580-2). Additionally, or alternatively, the genetic sequences of the selected phages can be modified or optimized, e.g. for expression in a suitable producer cell line, provided the essential genes are relatively conserved.

[0389] According to certain embodiments, the following exemplary method for finding the likely essential genes is used. A gene X was defined as essential if it was recognized and assigned a function by PATRIC (docs(dot)patricbrc(dot)org/). In addition, if the gene's function is unknown by PATRIC (e.g. “hypothetical protein” or “phage protein”) the following test is performed: given a phage genome, for a gene X, count the number of homologs (global amino acid similarity of 30% or more using blastp) in all publicly available phage genomes infecting the same species (num.homologs(gene X)). Subsequently, the mean and standard deviation of number of homologs for each gene in the genomes that were found to contain gene X were computed, and the z-score for gene X was calculated as follows:

$$z ( gene X ) = \frac{\begin{matrix}[ num . homologs ( gene X ) ] - \\ \begin{matrix}[ mean num . homologs ( each gene in \\ each genome containing gene ) ]\end{matrix}\end{matrix}}{\begin{matrix}standard deviation num . \\ \begin{matrix}homologs ( each gene in each \\ genome containing gene X )\end{matrix}\end{matrix}}$$

[0390] Genes with z-scores over −1 were defined essential. All other genes were defined non-essential.

[0391] Below, is a list of essential genes for each phage. Each gene is represented by square brackets, containing the following data fields separated by semi-columns: first, the gene's start coordinate, end coordinate, and strand to relate to with relation to the phage genome sequence as presented in the sequence listing (+ is the strand given in the sequence listing). Second, the gene's function. (“HP” denotes a hypothetical protein and “PP” denotes an unclassified phage protein).

[0392] Essential genes of phage CF1_20Aug470: [1:438:−;PP][536:829:−;PP][829:1086:−;PP][1086:1412:−;PP][1409:1735:−;PP][1732:2151:−;PP][2227:2556:−;PP][2564:2764:−;PP][2780:4831:−;Phage DNA helicase][4821:5153:−;PP][5140:6168:−;PP][6332:7015:−;PP][7584:8309:−;PP][8360:8557:−;PP][8582:8896:−;PP][8886:9095:−:PP][9476:10060:+;PP][10177:11787:+;Phage terminase %2C large subunit][11777:13777:+;PP][13752:14321:+;PP][14497:14865:+;PP][14871:15617:+;PP][15632:16888:+;PP][16974:17390:+;PP][17393:18046:+;PP][18058:18405:+;PP][18685: 19035:+;PP][19036:19422:+;PP][19527:19898:+;PP][19909:23004:+;PP][23015:23932:+;Streptococcal hemagglutinin protein][23946:25679:+;PP][25697:31246:+;PP][31302:31583:−;PP][32232:32486:−;PP][32465:33355:−;PP][34530:36935:−;DNA polymerase I (EC 2.7.7.7)][37050:37379:−;PP][37453:37968:−;PP][37996:38952:−;PP][39043:39300:−;PP][39297:39764:−;PP][39757:39993:−;PP][39996:40670:−;PP][40667:41692:−;PP][41694:42005:−;PP][42002:42187:−;PP][42201:42899:−;PP][42912:43214:−;PP][43218:43343:−;PP].

[0393] Essential genes of phage CF1_20sep416: [37:183:−;HP][258:2003:−;Ribonucleotide reductase of class Ia (aerobic) % 2C alpha subunit (EC 1.17.4.1)][1996:3132:−;HP][3059:3403:−;HP][3405:4352:−;putative thymidylate synthase][4407:4499:−;HP][4559:5509:−;HP][5502:5669:−;HP][5718:6053:−;HP][6072:6287:−;HP][6299:6481:−;HP][6478:7257:−;HP][7254:7424:−;HP][7421:7858:−;HP][7855:8061:−;HP][8082:8468:−;HP][8465:9028:−;HP][9025:10077:−;HP][10119:10340:−;HP][10350:10583:−;HP][10646:11650:−;HP][11752:12468:−;HP][12470:12637:−;HP][12667:13065:−;HP][13155:13844:−;HP][14132:16132:−;HP][16193:18055:−;HP][18109:18294:−;HP][18291:18536:−;HP][18546:18737:−;HP][18724:18852:−;HP][18970:19392:−;HP][19393:19695:−;HP][19698:19862:−;HP][19849:20514:−;HP][21190:21591:−;HP][21678:21875:−;HP][22599:22832:+;HP][22862:24007:+;PP][24020:24178:+;HP][24171:24980:+;Phage protein (ACLAME 992)][25006:25326:+;HP][25338:25643:+;HP][25687:26001:−;HP][26037:26342:−;HP][26474:26917:−;HP][26904:27143:−;HP][27161:27721:−;Phage endolysin][27738:29237:−;HP][29251:29625:−;HP][29669:31726:−;HP][31737:32468:−;HP][32487:33950:−;HP][34334:35074:−;HP][35071:35988:−;HP][35985:36341:−;HP][36347:37108:−;HP][37105:39471:−;tail length tape-measure protein][39468:39620:−;HP][39728:40099:−;HP][40113:40592:−;HP][40592:40963:−;HP][41167:41691:−;HP][41722:43008:−;HP][43021:43584:−;HP][43581:43961:−;HP][43961:44233:−;HP][44412:44888:−;HP][44939:45973:−;HP][46018:46428:−;HP][46456:47373:−;HP][47370:47840:−;HP][47850:49289:−;HP][49302:50822:−;HP][53455:53778:−;HP][54582:55049:+;HP][55046:55402:+;HP][55450:55998:+;HP][56059:56244:+;HP][56241:56534:+;HP][56535:56720:+;HP][56755:57033:+;HP][57030:57308:+;HP][57322:57639:+;HP][57648:57917:+;HP][57914:58126:+;HP][58136:58372:+;HP][58402:5879 1:+;HP][58788:59996:+;HP][60009:60470:+;HP][60535:61095:+;HP][61097:61657:+;H P][61647:62078:+;HP][62078:62632:+;HP][62645:62881:+;HP][62883:63158:+;HP][63 155:63562:+;HP][63574:64491:+;HP][64502:64918:+;HP][64928:65803:+;putative nicotinamide phosphoribosyl transferase][65800:66018:+;HP][66075:67763: +;Nicotinamide phosphoribosyltransferase (EC2.4.2.12)][67774:67971:+;HP][67968:68447:+;HP][68459:68608:+;HP][68610:68921:+;HP][68918:69499:+;HP][6988 3:70386:+;HP][70388:70729:+;HP][70726:70941:+;HP][70997:71284:+;HP][71281:716 43:+;HP][71643:71954:+;HP][71942:72220:+;HP][72223:72909:+;HP][72933:73349:+; HP][73339:73749:+;HP][73742:74008:+;HP][74727:75320:−;HP][76114:76272:−;HP][76435:76605:−;HP][76655:76849:−;HP][76949:77215:−;HP][77310:77600:−;HP][77618:78070:−;HP][78605:79144:−;HP][79219:79734:−;HP][79818:80315:−;HP][80352:80666:−;HP][80678:80923:−;HP][81027:81419:−;HP][81416:81682:−;HP][81715:81939:−;HP][81958:82152:−;HP][82416:82769:−;HP][82769:83107:−;HP][83112:83783:−;HP][83859:84242:−;HP][84479:84625:−;HP][84699:85007:−;HP][85007:85135:−;HP][85206:85454:−;HP][85451:85738:−;HP][85741:85881:−;HP][86252:86725:−;HP][87354:87527:−;HP][87750:88736:−;HP][89176:89406:−;HP][89408:89602:−;HP][89612:90097:−;HP][90109:90357:−;HP][90398:90583:−;HP][90573:90887:−;HP][90887:91123:−;HP][91123:91356:−;HP].

[0394] Essential genes of phage CF1_20Dec107: [1:129:+;Phage-associated DNA primase][1091:1672:+;HP][1829:2443:−;HP][2636:3262:−;HP][3273:3584:−;HP][3637:3867:−;HP][3923:4147:−;HP][4209:4538:−;HP][4539:5183:−;HP][5215:5424:−;HP][5830:6081:−;HP][6761:6949:−;HP][6952:7674:−;Phage capsid and scaffold][7691:7993:−;HP][8004:8150:−;HP][8326:9708:+;Phage terminase %2C large subunit][9745:10128:−;HP][10128:10343:−;HP][10343:10693:−;HP][10737:11120:−;HP][11123:11902:−;HP][13040:13135:−;HP][13132:14064:−;PP][14168:14515:−;HP][14764:15075:−;HP][15081:15284:−;HP][15281:15604:−;HP][15636:16037:−;PP][16218:18515:+;PP][18515:19351:+;Phage minor capsid protein][19370:19576:+;PP][19573:19713:+;HP][20226:21659:+;PP][21663:22298:+;PP][22308: 23456:+;Phage capsid and scaffold][23558:23995:+;PP][24010:24477:+;PP][24501:24872:+;PP][24880:25431:+;PP][25428:26009:+;PP][26112:27539:+;PP][27598: 28050:+;Phage tail fiber][28050:28373:+;PP][28370:28720:+;PP][28722:29153:+;HP][29163:29666:+;PP][29666:30205:+;PP][30214:30807:+;Phage tail fiber][30817:31245:+;HP][31249:33825:+;Phage internal (core) protein][33825:34688:+;PP][34688:35221:+;PP][35277:35942:+;Phage baseplate][35999:37252:+;PP][37249:38763:+;PP][38768:41656:+;Phage tail fiber][41658:42086:+;HP][42086:42748:+;Phage endolysin][42773:43024:−;HP][43304:44215:−;DNA ligase %2C phage-associated][44270:44824:−;Phage DNA-binding protein][44821:45426:−;PP][45483:46379:−;PP][46468:47088:−;PP][47183:48742:−;Phage DNA helicase][48739:49149:−;PP][49142:52249:−;DNA polymerase III alpha subunit (EC 2.7.7.7)][55485:55703:−;Phage tail assembly protein][55687:55905:−;HP][55905:56135:−;PP][56223:57224:−;HP][57329:58219:−;HP][58380:59567:−;Phage DNA helicase][59554:59976:−;HP][60145:60930:+;HP][62309:62758:+;HP][62755:63831:+;HP][63837:64022:+;HP][64170:65780:+;Phage-associated DNA primase].

[0395] Essential genes of phage CF1_20Nov10: [1:1443:+;PP][1440:2129:+;PP][2126:2560:+;PP][2541:3482:+;PP][3482:3862:+;PP][3867:5381:+;PP][5532:8699:+;PP][8711:9598:+;PP][9613:9969:+;PP][10176:10382:−;PP][10369:10578:−;HP][10582:10800:−;PP][10797:11558:−;PP][11744:12730:−;PP][12705:13589:−;Phage exonuclease][13589:13873:−;PP][13845:14372:−;PP][14326:14880:−;PP][14950:16587:−;DNA polymerase (EC 2.7.7.7) % 2C phage-associated][16790:17299:−;PP][17376:17654:−;PP][17968:18201:−;HP][18237:18548:−;HP][18515:19024:−;DNA polymerase %2C phage-associated][19008:20717:−;Phage DNA primase/helicase][20718:21095:−;PP][21095:21493:−;PP][21493:22374:−;PP][22505:22726:−;PP][22736:24268:−;PP][24280:25455:−;PP][25431:26000:−;PP][26790:27746:−;PP][27765:28727:−;PP][29159:29608:−;PP][29601:29828:−;PP][29954:30379:−;PP][30379:30648:−;PP][30648:30911:−;PP][30911:31144:−;PP][31182:31427:−;PP][31436:31582:−;PP][31569:31724:−;HP][31735:32010:−;PP][32012:32245:−;PP][32377:32523:−;PP][32739:32879:−;PP][33167:33649:−;PP][33653:33958:−;PP][35882:36340:+;PP][36273:36770:+;Phage baseplate hub][36770:38218:+;Phage terminase %2C large subunit][38218:40338:+;Phage portal (connector) protein][40392:40583:+;PP][40583:41575:+;Phage capsid and scaffold][42735:42917:+;PP][42921:43547:+;PP][43558:43749:+;PP][43733:43981:+;PP][43971:44618:+;Phage tail fiber][44627:44725:+;PP].

[0396] Essential genes of phage CF1_20Oct199: [2:1267:+;PP][1264:2778:+;PP][2783:5677:+;Phage tail fiber][5679:6107:+;HP][6107:6769:+;Phage endolysin][6794:7045:−;HP][7325:8236:−;DNA ligase %2C phage-associated][8291:8845:−;Phage DNA-binding protein][8842:9447:−;PP][9504:10403:−;PP][10492:11112:−;PP][11207:12766:−;Phage DNA helicase][12763:13173:−,PP][13166:16273:−;DNA polymerase III alpha subunit (EC 2.7.7.7)][18115:19032:−;Thymidylate synthase ThyX (EC 2.1.1.148)][19032:19238:−;HP][19246:19512:−;HP][19512:19730:−;Phage tail assembly protein][19714:19932:−;HP][19932:20162:−;PP][20250:21251:−;HP][21356:22249:−;HP][22410:23597:−;Phage DNA helicase][23584:24006:−;HP][24175:24960:+;HP][25892:26350:+;HP][26347:27423:+;HP][27429:27614:+;HP][27762:29501:+;Phage-associated DNA primase][30469:31038:+;HP][31206:31817:−;HP][32008:32679:−;HP][32931:33242:−;HP][33295:33525:−;HP][33581:33805:−;HP][33870:34196:−;HP][35082:35279:−;HP][35291:35506:−;HP][35503:35703:−;HP][35700:35951:−;HP][36077:36262:−;HP][36347:36535:−;HP][36538:37260:−;Phage capsid and scaffold][37277:37579:−;HP][37934:38098:−;HP][38141:38335:−;HP][38503:39885:+;Phage terminase %2C large subunit][40305:40520:−;HP][40520:40870:−;HP][40914:41297:−;HP][41300:42079:−;HP][43217:43312:−;HP][43309:44241:−;PP][44345:44692:−;HP][45458:45781:−;HP][45813:46214:−;PP][46395:48692:+;PP][48692:49528:+;Phage minor capsid protein][49547:49753:+;PP][49750:49890:+;HP][53735:54172:+;PP][54187:54654:+;PP][54678:55049:+;PP][55057:55608:+;PP][55605:56186:+;PP][56289:57716:+;PP][57775: 58227:+;Phage tail fiber][58227:58550:+;PP][58547:58897:+;PP][58899:59330:+;HP][59340:59843:+;PP][5 9843:60382:+;PP][60391:60984:+;Phage tail fiber][60994:61422:+;HP][61426:64002:+;Phage internal (core) protein][64002:64865:+;PP][64865:65398:+;PP][65454:66119:+;Phage baseplate][66176:66289:+;PP].

[0397] Essential genes of phage CF1_20Sep420: [1:855:+;HP][916:1128:+;HP][1128:2102:+;HP][2104:4014:+;Phage DNA helicase (ACLAME 43)][4027:4218:+;HP][4368:4502:+;HP][4512:4802:+;HP][4789:4905:+;HP][4898:5878: +;HP][6080:8137:+;Phage DNA polymerase][8148:8342:+;HP][8437:8841:+;HP][8901:9110:−;HP][9150:9857:−;HP][9858:10154:−;HP][10154:17812:−;HP][17782:18195:−;HP][18195:18707:−;HP][18659:19021:−;HP][19021:21996:−;HP][22059:22496:−;HP][22493:22753:−;HP][22804:23220:−;HP][23237:24913:−;HP][25087:25185:−;HP][25169:25552:−;HP][25549:26058:−;HP][26086:26217:+;HP][26214:26861:+;HP][26866:27330:−;HP][27412:28428:−;Phage major capsid protein of Caudovirales][28406:28504:−;HP][28552:29343:−;HP][29366:30850:−;HP][30854:32467:−;Phage terminase %2C large subunit][32451:32966:−;HP][33021:33563:−;HP][33563:33871:−;HP][33868:34239:−;HP][34236:34703:−;HP][34743:35147:−;HP][35207:35686:−;HP][35683:36249:−;HP][36336:36680:−;HP][36719:36952:−;HP][36954:37244:−;HP][37241:37639:−;HP][37693:37878:−;HP][37875:38216:−;HP][38213:38413:−;HP][38410:38649:−;HP][38649:38921:−;HP][38918:39094:−;HP][39091:39300:−;HP][39303:39536:−;HP][39533:39757:−;HP][39754:40047:−;HP][40058:40231:−;HP][40241:40393:−;HP][40372:40485:−;HP][40574:40783:−;HP][40780:41094:−;HP][41193:41429:−;HP][41426:41716:−;HP][41716:41973:−;HP][41995:42429:−;HP][42520:42927:−;HP][42929:43117:−;HP][43114:43260:−;HP][43276:43494:−;HP][43705:43890:−;HP][43969:44157:−;HP][44356:44448:−;HP][44426:45634:+;HP][45703:45915:+;HP][45924:46673:+;HP][46670:46933:+;HP][46937:47200:+;HP][47202:47462:+;HP][47437:47919:+;HP][47946:48128:+;HP][48200:48493:+;HP][48542:49132:+;HP][49132:49419:+;HP][49424:49615:+;HP][49633:4992 9:+;HP][49935:50798:+;HP][50869:51336:+;HP][51393:51617:+;HP][51628:51972:+;H P][51969:52202:+;HP][52202:52435:+;HP][52512:52934:+;HP][52849:53358:+;HP][53 339:53686:+;HP][53715:53936:+;HP][53981:54241:+;HP][54244:54597:+;HP][54510:5 5046:−;HP][54994:55317:+;HP][55371:55583:+;HP][55580:55744:+;HP][55741:57984:+;HP][57986:58780:+;HP][58855:59265:+;HP][59332:59574:+;HP][5966 9:59899:+;HP][59896:60123:+;HP][60120:60524:+;HP][60527:61474:+;HP][61525:622 47:+;HP][62253:62483:+;HP].

[0398] Essential genes of phage CF1_20Sep418: [2:418:−;HP][415:795:−;HP][795:1067:−;HP][1246:1722:−;HP][1773:2807:−;HP][2853:3263:−;HP][3291:4208:−;HP][4205:4675:−;HP][4685:6124:−;HP][6137:7657:−;Phage terminase %2C large subunit][10516:10839:−;HP][11644:12111:+;HP][12108:12464:+;HP][12512:13060:+;HP][13121:13306:+;HP][13303:13596:+;HP][13597:13782:+;HP][1381 7:14095:+;HP][14092:14370:+;HP][14384:14701:+;HP][14710:14979:+;HP][14976:151 88:+;HP][15198:15434:+;HP][15464:15853:+;HP][15850:17058:+;HP][17071:17532:+; HP][17597:18157:+;HP][18159:18719:+;HP][18709:19140:+;HP][19140:19694:+;HP][1 9707:19943:+;HP][19945:20220:+;HP][20217:20624:+;HP][20636:21553:+;HP][21564: 21980:+;HP][21990:22856:+;ribose-phosphate pyrophosphokinase family protein][22853:23071:+;HP][23128:24816:+;Nicotinamide phosphoribosyltransferase (EC 2.4.2.12)][24829:25026:+;HP][25023:25502:+;HP][25514:25663:+;HP][25665:25976:+;HP][25973:26554:+;HP][26938:27441:+;HP][27443:27784:+;HP][2778 1:27996:+;HP][28053:28415:+;HP][28415:28726:+;HP][28714:28992:+;HP][28995:297 02:+;HP][29719:30141:+;HP][30131:30535:+;HP][30535:30801:+;HP][31533:32135:−;HP][32320:32457:+;HP][32949:33107:−;HP][33270:33440:−;HP][33490:33684:−;HP][33784:34050:−;HP][34145:34435:−;HP][34453:34905:−;HP][35440:35991:−;HP][36066:36581:−;HP][36665:37162:−;HP][37199:37513:−;HP][37525:37770:−;HP][37874:38266:−;HP][38263:38529:−;HP][38562:38786:−;HP][38805:38999:−;HP][39263:39616:−;HP][39616:39954:−;HP][39959:40630:−;HP][40706:41089:−;HP][41326:41472:−;HP][41546:41854:−;HP][41854:41982:−;HP][42053:42301:−;HP][42298:42585:−;HP][42588:42728:−;HP][42741:43007:−;HP][43082:43558:−;HP][44187:44360:−;HP][44583:45569:−;HP][46010:46240:−;HP][46242:46436:−;HP][46446:46931:−;HP][46943:47191:−;HP][47232:47417:−;HP][47407:47721:−;HP][47721:47957:−;HP][47957:48190:−;HP][48635:50380:−;Ribonucleotide reductase of class Ia (aerobic) % 2C alpha subunit (EC 1.17.4.1)][50373:51509:−;HP][51436:51780:−;HP][51783:52730:−;putative thymidylate synthase][52785:52877:−;HP][52937:53887:−;HP][53880:54047:−;HP][54096:54431:−;HP][54450:54665:−;HP][54677:54859:−;HP][54856:55635:−;HP][55632:55802:−;HP][55799:56236:−;HP][56233:56463:−;HP][56460:57023:−;HP][57020:58072:−;HP][58114:58335:−;HP][58345:58578:−;HP][58641:59645:−;HP][59747:60463:−;HP][60465:60632:−;HP][60662:61060:−;HP][61150:61839:−;HP][62127:64127:−;HP][64188:66050:−;HP][66104:66289:−;HP][66286:66531:−;HP][66541:66732:−;HP][66719:66847:−;HP][66965:67387:−;HP][67388:67690:−;HP][67693:67857:−;HP][67844:68509:−;HP][68506:68895:−;HP][68897:69151:−;HP][69185:69586:−;HP][69673:69870:−;HP][70580:70813:+;HP][70843:71988:+;PP][72001:72159:+;HP][72152:72961:+;Phage protein (ACLAME 992)][72963:73283:+;HP][73295:73603:+;HP][73651:73965:−;HP][74001:74306:−;HP][74438:74881:−;HP][74868:75107:−;HP][75125:75685:−;Phage endolysin][75702:77201:−;HP][77215:77589:−;HP][77633:79690:−;HP][79701:80432:−;HP][80451:81914:−;HP][81916:82287:−;HP][82298:83038:−;HP][83035:83952:−;HP][83949:84305:−;HP][84311:85072:−;HP][85069:87435:−;tail length tape-measure protein][87432:87584:−;HP][87692:88063:−;HP][88077:88556:−;HP][88556:88927:−;HP][89131:89655:−;HP][89686:90972:−;HP][90985:91164:−;HP].

[0399] Essential genes of phage CF1_20Aug400: [1:186:+;Phage structural protein p29][198:1730:+;Phage collar %2C head-to-tail connector protein Gp8][1734:2702:+;Phage capsid assembly scaffolding protein p31][2754:3761:+;Phage major capsid protein Gp10A][3858:4412:+;Phage non-contractile tail tubular protein Gp11][4415:6895:+;Phage non-contractile tail tubular protein Gp12][6895:7440:+;Phage protein p35][7440:10136:+;Phage baseplate hub structural protein/Phage lysozyme R (EC 3.2.1.17)][10140:14153:+;Phage DNA ejectosome component Gpl6%2C peptidoglycan lytic exotransglycosylase (EC 4.2.2.n1)][14155:14910:+;Phage non-contractile tail fiber protein Gp17][14910:15368:+;Phage protein p39][15361:16269:+;Phage protein p40][16273:16878:+;Phage protein p41][16878:17183:+;Phage terminase small subunit Gpl8%2C DNA packaging][17193:18998:+;Phage terminase large subunit Gp19%2C DNA packaging][18998:19195:+;Phage protein p44][19330:19674:+;Phage endolysin][19632:19961:+;Putative phage-encoded lipoprotein p46][20051:20365:+;Phage protein p47][20415:20609:+;Phage protein p48][22644:22928:+;Phage protein p01][22928:23155:+;Phage protein p02][23166:23705:+;Phage protein p03][23768:23872:+;HP][23875:23994:+;HP][24073:24441:+;Phage protein p04][24428:24655:+;Phage protein p05][24834:25007:+;Phage protein p06][25007:25291:+;Phage protein p07][25527:25820:+;Phage protein p07][25899:26312:+;Phage protein p10][26381:26740:+;Phage protein p11][26743:27675:+;Phage DNA-binding protein p12][27937:28479:+;Phage protein p13][28484:28597:+;PP][28656:29489:+;Phage primase/helicase protein Gp4A][29533:30726:+;Phage DNA helicase][30716:31336:+;Phage protein p16][31285:32283:+;Phage-associated ATP-dependent DNA ligase (EC 6.5.1.1)][32280:32600:+;Phage protein p18][32597:35020:+;Phage DNA-directed DNA polymerase (EC 2.7.7.7)][35017:35328:+;Phage protein p20][35383:36432:+;Phage protein p21][36432:37373:+;Phage exonuclease (EC 3.1.11.3)][37363:37803:+;Phage endonuclease][37800:38846:+;Phage exonuclease][38856:39227:+;Phage protein p25][39220:39570:+;PP][39579:42026:+;Phage DNA-directed RNA polymerase (EC 2.7.7.6)][42220:42471:+;Phage protein p27][42471:42944:+;Phage protein p28].

[0400] Essential genes of phage CF1_20Dec110: [11:96:−;HP][171:1916:−;Ribonucleotide reductase of class Ia (aerobic) % 2C alpha subunit (EC 1.17.4.1)][1909:3045:−;HP][2972:3316:−;HP][3318:4265:−;putative thymidylate synthase][4320:4412:−;HP][4472:5422:−;HP][5415:5582:−;HP][5631:5966:−;HP][5985:6200:−;HP][6212:6394:−;HP][6391:7170:−;HP][7167:7337:−;HP][7334:7771:−;HP][7768:7974:−;HP][7995:8381:−;HP][8378:8941:−;HP][8938:9990:−;HP][10032:10256:−;HP][10263:10496:−;HP][10559:11563:−;HP][11665:12381:−;HP][12383:12550:−;HP][12580:12978:−;HP][13068:13757:−;HP][14045:16045:−:HP][16106:17968:−;HP][18022:18207:−;HP][18204:18449:−;HP][18459:18650:−;HP][18637:18765:−;HP][18883:19305:−;HP][19306:19608:−;HP][19611:19775:−;HP][19762:20427:−;HP][21103:21504:−;HP][21591:21788:−;HP][22512:22745:+;HP][22775:23920:+;PP][23933:24091:+;HP][24084:24893:+;Phage protein (ACLAME 992)][24895:25215:+;HP][25227:25535:+;HP][25583:25897:−;HP][25933:26238:−;HP][26370:26813:−;HP][26800:27039:−;HP][27057:27617:−;Phage endolysin][27634:29133:−;HP][29147:29521:−;HP][29565:31622:−;HP][31633:32364:−;HP][32383:33846:−;HP][33848:34219:−;HP][34230:34970:−;HP][34967:35884:−;HP][35881:36237:−;HP][36243:37004:−;HP][37001:39367:−;tail length tape-measure protein][39364:39516:−;HP][39624:39995:−;HP][40009:40488:−;HP][40488:40859:−;HP][41063:41587:−;HP][41618:42904:−;HP][42917:43480:−;HP][43477:43857:−;HP][43857:44129:−;HP][44308:44784:−;HP][44835:45869:−;HP][45915:46325:−;HP][46353:47270:−;HP][47267:47737:−;HP][47747:49186:−;HP][49199:50719:−;Phage terminase %2C large subunit][53578:53901:−;HP][54707:55174:+;HP][55171:55527:+;HP][55575:56123:+;HP][56184:56369:+;HP][56366:56659:+;HP][56660:56845:+;HP][56880:57158:+;HP][57155:57433:+;HP][57447:57764:+;HP][57773:58042:+;HP][58039:58251:+;HP][58261:58497:+;HP][58527:5891 6:+;HP][58913:60121:+;HP][60134:60595:+;HP][60660:61220:+;HP][61222:61782:+;H P][61772:62203:+;HP][62203:62757:+;HP][62770:63006:+;HP][63008:63283:+;HP][63 280:63687:+;HP][63699:64616:+;HP][64627:65043:+;HP][65053:65919:+;ribose-phosphate pyrophosphokinase family protein][65916:66134:+;HP][66191:67879:+;Nicotinamide phosphoribosyltransferase (EC 2.4.2.12)][67892:68089:+;HP][68086:68565:+;HP][68577:68726:+;HP][68728:69039:+;HP][69036:69614:+;HP][69998:70501:+;HP][70503:70844:+;HP][7084 1:71056:+;HP][71113:71475:+;HP][71475:71786:+;HP][71774:72052:+;HP][72055:727 62:+;HP][72779:73201:+;HP][73191:73595:+;HP][73595:73840:+;HP][74368:74970:−;HP][76073:76243:−;HP][76571:76861:−;HP][76879:77313:−;HP][77369:77539:−;HP][77564:77701:−;HP][79070:79567:−;HP][79604:79918:−;HP][79930:80175:−;HP][80279:80671:−;HP][80668:80934:−;HP][80967:81191:−;HP][81210:81404:−;HP][81668:82021:−;HP][82021:82359:−;HP][82364:83035:−;HP][83111:83494:−;HP][83731:83877:−;HP][83951:84259:−;HP][84259:84387:−;HP][84458:84706:−;HP][84703:84990:−;HP][84993:85133:−;HP][85146:85412:−;HP][85487:85963:−;HP][86592:86765:−;HP][86988:87974:−;HP][88415:88645:−;HP][88647:88841:−;HP][88851:89336:−;HP][89348:89596:−;HP][89637:89822:−;HP][89812:90126:−:HP][90126:90362:−;HP][90362:90595:−;HP].

[0401] Essential genes of phage CF1_21Oct114: [42:258:+;HP][723:945:+;HP][953:1241:+;HP][1243:1591:+;HP][1836:2844:+;HP][3153:3711:+;HP][3842:5699:+;N-acetylneuraminate epimerase][5896:6433:+;HP][7106:7394:+;HP][7393:7609:+;HP][7669:8608:+;N-acetylneuraminate epimerase][8917:10486:+;HP][10678:11242:+;HP][11473:11773:+;HP][11772:12033:+; HP][12040:12217:+;HP][12397:13282:+;HP][13332:13866:−;HP][13878:14007:−;HP][14012:14690:−;HP][15119:15650:−;HP][15636:16104:−;HP][16333:16756:−;HP][16755:17457:−;HP][17535:18225:−;HP][18300:19815:−;ATP-dependent zinc metalloprotease FtsH][19811:20639:−;HP][20718:20922:−;HP][20927:21488:−;HP][21490:21832:−;HP][21828:22038:−;HP][22034:22817:−;HP][23058:23295:−;HP][23336:23852:−;HP][23916:24276:−;HP][24289:24805:−;HP][24818:25187:−;HP][25197:25707:−;HP][25696:26290:−;HP][26299:26761:−;HP][26760:27216:−;HP][27302:27761:−;HP][27753:28197:−;HP][28193:28709:−;HP][28726:29107:−;HP][29163:29643:−;HP][29646:30006:−;HP][30013:30244:−;HP][30251:30896:−;HP][30933:31293:−;HP][31337:31862:−;HP][31876:32074:−;HP][32105:32405:−;HP][32516:32873:−;HP][32966:33407:−;HP][33406:33784:−;HP][33798:34191:−;HP][34199:34460:−;HP][34462:34885:−;HP][34884:35235:−;HP][35289:35763:−;HP][35805:36336:−;HP][36337:36730:−;HP][36726:36963:−;HP][36977:37583:−;HP][37748:38156:−;HP][38207:38630:−;HP][38692:39004:−;HP][39063:39930:−;HP][39926:40277:−;HP][40284:40629:−;HP][40625:40961:−;HP][40942:41158:−;HP][41154:41496:−;HP][41495:41786:−;HP][41785:42286:−;HP][42285:42654:−;HP][42650:43073:−;HP][43069:43414:−;HP][43410:43758:−;HP][43798:44293:−;HP][44285:44480:−;HP][44460:44631:−;HP][44726:45176:−;HP][45190:45640:−;HP][45642:45999:−;HP][46106:46379:−;HP][46378:46984:−;HP][47010:47490:−;HP][47605:47998:−;HP][48008:48347:−;HP][48383:48788:−;HP][48932:49493:−;HP][49482:49962:−;HP][50012:50114:−;HP][50123:50435:−;HP][50687:51257:−;HP][51253:51811:−;HP][51863:52313:−;HP][52315:52597:−;HP][52571:52958:−;HP][53011:54367:−;HP][54368:54575:−;HP][54571:54970:−;HP][55059:56826:−;HP][56842:57730:−;HP][57777:59031:−;RNA-splicing ligase RtcB][59170:59752:−;HP][59748:60576:−;HP][60572:60980:−;HP][60976:61585:−;HP][61632:63063:−;Thymidylate synthase][63062:63401:−;HP][63387:63792:−;HP][63788:64097:−;HP][64093:64360:−;HP][64362:65118:−;HP][65202:65451:−;HP][65450:66248:−;HP][66262:66694:−;HP][66701:67217:−;HP][67339:67705:−;HP][67757:68258:−:HP][68266:68431:−;HP][68430:68856:−;HP][68855:69251:−;HP][69317:69650:−;HP][69627:69978:−;HP][70122:70515:−;HP][70601:71090:−;HP][71134:71344:−;HP][71380:71632:−;HP][71650:73693:−;DNA ligase][73685:74240:−;HP][74337:74805:−;HP][74894:75539:−;dCTP deaminase][75587:76166:−;HP][76152:76461:−;HP][76706:77345:−;HP][77352:77829:−;HP][77830:78568:−;7-cyano-7-deazaguanine synthase][78618:78720:−;HP][78683:78842:−;HP][78851:79274:−;HP][79215:79587:−;HP][79586:80051:−;HP][80060:81161:−;HP][81215:81575:−;HP][81604:82021:−;HP][82017:82800:−;HP][82905:83856:+;HP][83868:84855:+;HP][84857:85808:+;HP][85816:86770:+;HP][87038:90194:+;HP][90206:90593:+;HP][90605:93656:+;HP][9369 3:94365:−;HP][94386:94818:−;HP][94894:95383:−;HP][95488:95851:−;HP][95918:96401:−;HP][96489:97209:−;HP][97268:97499:−;HP][97533:98568:−;Thymidylate kinase][98632:99052:−;HP][99111:99312:−;HP][99321:99816:−;HP][99987:100569:−;HP][100578:101049:−;HP][101065:103042:−;HP][103097:109868:−;HP][109935:111588:+;HP][111590:115952:+;HP][115935:116130:+;HP][116142:11784 9:+;HP][117918:118641:+;HP][118656:119490:+;HP][119539:119851:−;HP][120018:121143:−;HP][121223:121601:−;HP][121605:122361:−;HP][122414:122957:−;HP][123032:123545:+;HP][123588:124224:−;HP][124351:124792:−;HP][124788:124932:−;HP][125056:125449:−;HP][125485:126010:−;HP][126006:126180:−;HP][126172:126529:−;HP][126544:126856:−;HP][126961:127306:−;HP][127336:129829:−;HP][129897:130707:+;HP][130706:130973:+;HP][131013:132198:−;HP][132208:133969:−;HP][134022:134652:−;HP][134728:135184:−;HP][135191:135611:−;HP][135620:137195:−;HP][137242:138550:−;HP][138739:139027:+;HP][139053:139464:+;HP][139506:140952:+;Ribonuclease H][141067:141373:+;HP][141413:142382:−;HP][142480:143920:+;HP][143864:144257:+;HP][144305:144653:+;HP][144675:144996:+;HP][145031:145706:+; HP][145708:146185:+;HP][146181:146943:+;HP][146966:150290:−;HP][150289:152758:−;HP][152925:153945:−;HP][154076:154856:−;HP][154873:155407:−;HP][155497:155902:−;HP][156123:156618:−;HP][156630:157197:−;HP][157207:158104:−;HP][158187:158676:−;HP][158683:159166:−;HP][159110:159707:−;HP][159719:161084:−;HP][161084:162491:−;HP][162501:163869:−;HP][163946:164270:−;HP][164281:166564:−;HP][166658:167939:+;HP][167978:170675:−;HP][170710:172879:+;HP][172881:173760:+;HP][173769:174198:+;HP][174251:17447 9:−;HP][174524:175229:−;HP][175282:175822:−;HP][175871:176282:−;HP][176327:178391:−;HP][178414:180040:−;HP][180048:181086:−;HP][181048:181528:−;HP][181744:183970:−;HP][184041:184578:−;HP][184715:186254:+;HP][186314:186716:+;HP][187131:187398:−;HP][187651:188089:−;HP][188094:188361:−;HP][188360:188603:−;HP][188599:188809:−;HP][188805:189360:−;HP][189520:189805:−;HP][189794:190133:−;HP][190428:191457:−;HP][191547:192180:−;HP][192189:192330:−;HP][192363:193521:−;HP][193577:194180:−;HP][194353:194740:−;HP][194744:195068:−;HP][195106:195259:−;HP][195264:195606:−;HP][195617:195773:−;HP][195888:196170:−;HP][196196:196394:−;HP][196409:196739:−;HP][196735:196831:−;HP][196833:196938:−;HP][197009:197438:−;HP][197512:197986:−;HP][198054:198219:−;HP][198228:198372:−;HP][198379:198811:−;HP][198842:200228:−;HP][200227:200800:−;HP][200806:202213:−;HP][202215:203862:−;HP][203940:206475:−;HP][206569:207691:−;HP][207740:209174:−;HP][209234:210395:−;HP][210469:211732:−;HP][211791:214446:−;HP][214514:215813:−;HP][215823:216357:−;HP][216367:217261:−;HP][217276:218461:−;HP][218498:219542:+;HP][219552:222468:+;HP][222506:223745:−;HP][223737:224040:−;HP][224057:224498:−;HP][224513:225761:−;HP][225869:227813:+;HP][227890:228178:+;HP][228216:228588:−;HP][228574:229486:−;HP][229559:230984:−;HP][231046:232390:−;HP][232376:233228:−;HP][233352:233949:+;HP][233960:235562:+;HP][235627:236023:+;HP][236072:23631 2:−;HP][236325:236586:−;HP][236594:236783:−;HP][236787:236997:−;HP][237044:237347:−;HP][237357:237630:−;HP][237677:238739:−;HP][238774:239212:−;HP][239268:241242:−;HP][241268:242156:−;HP][242440:243394:−;HP][243405:244620:−;HP][244693:245056:+;HP][245099:246419:−;HP][246393:248028:−;HP][248047:249625:−;HP][249747:250494:−;HP][250578:251406:−;HP][251408:252602:−;HP][252543:253155:−;HP][253135:253726:−;HP][253730:254135:−;HP][254203:254626:−;HP][254684:255299:−;HP][255319:256786:−;DNA-directed RNA polymerase subunit beta'][257178:259044:−;HP][259334:260960:−;HP][261041:262127:+;HP][262164:262587:−:HP][262629:263799:−;HP][263853:264018:−;HP][264028:266179:−;HP][266360:266768:−;HP][266791:267217:−;HP][267206:268001:−;HP][268352:268823:−;HP][268764:269109:−;HP][269131:269524:−;HP][269566:270586:−;HP][270602:270995:−;HP][271144:271957:+;HP][271904:272891:+;HP][272938:273169:−;HP][273180:273405:−;HP][273514:273922:−;HP][273928:274357:−;HP][274383:274662:−;HP][274645:275212:−;HP][275257:275752:−;HP][275831:276254:−;HP][276250:276493:−;HP][276539:277487:−;HP][277633:278398:−;HP][278394:278523:−;HP][278533:278755:−;HP][279126:279912:−;HP][280014:280320:−;HP][280329:281091:−;HP][281178:281526:−;HP][281634:282021:−;HP][282024:282651:−;HP][282660:283665:−;HP][283764:285009:+;HP][285059:285275:−;HP][285274:285478:−;HP][285481:285847:−;HP][285858:286218:−;HP][286320:286533:−;HP][286532:287408:−;HP][287440:289534:−;HP][289665:290601:+;HP][290611:293308:+;HP][293309:294974:+;HP][295041:29569 2:+;HP][295778:297965:+;HP][298008:298503:−;HP][298534:299056:−;Dihydrofolate reductase][299067:299649:−;HP][299645:299999:−;HP][300195:302481:+;Ribonucleoside-diphosphate reductase 1 subunit alpha][302610:303768:+;Ribonucleoside-diphosphate reductase 1 subunit beta][303767:304181:+;HP].

### Example 8 Synergic Increased TTM Achieved by a Phage Cocktail

[0402] To test the effect on the time till growth of resistant mutant bacteria (TTM) is detected, cocktails CFX1 and CFX7 as well as individual member phages of those cocktails were tested against different bacterial strains. 10 bacterial colonies of each bacterial strain tested were picked (˜full 1 uL loop) and transferred into a culture tube prefilled with 4 mL of liquid BHIS and cultured to OD600≥1.5 by shaking, 180 rpm, at 37° C. for ˜16 h. The bacterial culture was diluted using BHIS supplemented with 1 mM MMC ions to reach a final OD of 0.05 and dispensed into a 96-well plate. Each phage was diluted to a concentration of 10\hat{ }8 PFU/ml, and to create the cocktail, equal ratios were mixed to get the same total concentration as the individuals. Then, 10 μL of the sample of single or cocktail phages were added to the wells to a final concentration of 10\hat{ }6 PFU/well. For NPC, BHIS was added to the appropriate wells. Mineral oil was added to each well to reduce evaporation of the samples, and the plate was covered with sterile film to allow bacteria growth and keep the culture sterile. Plates were incubated for 30-45 hours in a plate reader at 37° C. with shaking, and OD600 was measured every 20 minutes. Two biological repeats were performed for the assay, and BHIS media supplemented with 1 mM MMC ions served as a blank. FIGS. 5A to 5D present the effect of CFX7 cocktail compared to each member phage with respect to four bacterial strains, 788, 908, 560 and 667, respectively. For example, with respect to bacterial strain 788, elimination of mutant growth is achieved up till 25 hours from experiment start, and in case of bacterial strain 667 growth of mutant bacteria was eliminated up till end of the experiment. FIGS. 5E to 5F present the effect of CFX1 cocktail compared to each member phage with respect to two bacterial strains, 830 and 907, respectively. FIG. 5G present the effect of CFX1 cocktail compared to each member phage with respect to a mixture of equal concentration of three bacterial strains, prepared as described above. The ability of CFX1 to eliminate any bacterial resistant mutants' growth for prolong time is achieved.

[0403] Altogether, FIGS. 5A to 5G demonstrates the ability of a synergistic performing phage mixture to eliminate resistant mutant growth in comparison each phage member separately.

[0404] Table 5 presents, for each graph in FIGS. 5A to 5G, the approximate time (in hours) when the corresponding OD600 reading reaches the value 0.1, indicative of mutant bacterial growth. The table also presents the OD600 normalized area under the curve (AUC), i.e., the ratio between the AUC600 of the line representing treatment with the phage and the AUC600 of the line representing OD600 readings of the no phage control (NPC):

$$normalized area under the curve = \frac{Phage treatment area under the curve}{NPC area under the curve}$$

TABLE 5

| | Approx. Time (hours) | Normalized area under |
|---|---|---|
| | when OD600 reaches 0.1 | the curve |
| 788 + CF1_20Nov10 | 18.9 | 0.39 |
| 788 + CF1_20Dec107 | 16.7 | 0.42 |
| 788 + CF1_20Dec110 | 17.4 | 0.30 |
| 788 + CF1_21Oct114 | 34.1 | 0.16 |
| 788 + CFX7 | No mutant's growth | 0.04 |
| 788 | 3.0 | 1.00 |
| 908 + CF1_20Nov10 | 9.8 | 0.81 |
| 908 + CF1_20Dec107 | 12.1 | 0.73 |
| 908 + CF1_20Dec110 | 13.6 | 0.59 |
| 908 + CF1_21Oct114 | 28.0 | 0.24 |
| 908 + CFX7 | No mutant's growth | 0.08 |
| 908 | 2.3 | 1.00 |
| 560 + CF1_20Nov10 | 10.6 | 0.57 |
| 560 + CF1_20Dec107 | 13.6 | 0.52 |
| 560 + CF1_20Dec110 | 12.1 | 0.45 |
| 560 + CF1_21Oct114 | 25.0 | 0.27 |
| 560 + CFX7 | No mutant's growth | 0.11 |
| 560 | 3.0 | 1.00 |
| 667 + CF1_20Nov10 | 12.1 | 0.71 |
| 667 + CF1_20Dec107 | 12.9 | 0.51 |
| 667 + CF1_20Dec110 | 13.6 | 0.54 |
| 667 + CF1_21Oct114 | 34.8 | 0.17 |
| 667 + CFX7 | No mutant's growth | 0.03 |
| 667 | 3.0 | 1.00 |
| 830 + CF1_20Nov10 | 12.9 | 0.68 |
| 830 + CF1_20Dec107 | 0.8 | 0.57 |
| 830 + CF1_20Dec110 | 18.2 | 0.42 |
| 830 + CF1_21Oct114 | 35.6 | 0.25 |
| 830 + CFX1 | 22.7 | 0.30 |
| 830 + CFX7 | 39.4 | 0.23 |
| 830 | 0.1 | 1.00 |
| 907 + CF1_20Nov10 | 16.7 | 0.48 |
| 907 + CF1_20Dec107 | 3.0 | 0.90 |
| 907 + CF1_20Dec110 | 15.9 | 0.42 |
| 907 + CF1_21Oct114 | No mutant's growth | 0.21 |
| 907 + CFX1 | 25.8 | 0.28 |
| 907 + CFX7 | No mutant's growth | 0.13 |
| 907 | 3.0 | 1.00 |
| Bacteria + CFX1 | 25.8 | 0.31 |
| Bacteria + CF1_20Dec110 | 8.3 | 1.02 |
| Bacteria + CF1_20Dec107 | 10.6 | 0.67 |
| Bacteria + CF1_20Nov10 | 9.8 | 1.15 |
| Bacteria only | 8.3 | 1.00 |

### Example 9 Testing the Phage Efficacy Using In Vivo and Ex Vivo Models of Chronic Lung Infection with Pseudomonas aeruginosa

[0405] Animal models of cystic fibrosis (CF) are used to assess phage efficacy in relevant niche that mimics human CF lungs. For example, Kent and colleagues reported the development of a congenic strain designated B6-CFTRtm1UNC/CFTRtm1UNC (Kent G et al., 1997, Guilbault et al., 2006, Zhou et al., 2011), which enable spontaneous and progressive lung disease. In addition, Transgenic mice overexpressing airway-specific ENaC to increase Na ions absorption, enable spontaneous and progressive lung disease (Kukavica-Ibrulj et al., 2008). Ex vivo systems include the CF bronchial epithelial co-culture model for P. aeruginosa biofilms (Moreau-Marquis, Bomberger, et al. 2008, AJP Lung) where the bronchial epithelial cells of a CF patient are co-cultured with P. aeruginosa biofilms to mimic CF lung niche and to enable testing of various anti P. aeruginosa treatments.

[0406] Such models are used to test and confirm the phages' efficacy e.g., by measuring if the bacterial burden & biofilm mass are reduced upon phage treatment.

### Example 10 Phage Specificity

[0407] To verify the specificity of the phages, three phages, CF1_20Nov10, CF1_20Dec107 and CF1_20Dec110 were tested against other species of bacteria as detailed in the table below. A solid assay was used as detailed above. Bacterial strains on which the EOP was ≥0.1 for the tested phage (i.e., sensitivity to the tested phage) were designated as “S” within green cells in all results tables. Bacteria on which the EOP was <0.1 for the tested phage were designated as resistant to the tested phage (“R” within red cells in all tables). No cross-species infectivity was observed.

| Bacteria | CF1_20Nov10 | CF1_20Dec107 | CF1_20Dec110 |
|---|---|---|---|
| Veillonella dispar | R | R | R |
| Staphylococcus aureus | R | R | R |
| Fusobacterium nucleatum | R | R | R |
| Klebsiella aeruginosae | R | R | R |
| Escherichia coli | R | R | R |
| Pseudomonas aeruginosa | S | S | S |
| (positive control) | | | |

### Example 11 Phage Efficacy in CF Patients' Sputum

[0408] To evaluate the ability of the phage to infect bacteria in a clinically relevant sample matrix: sputum samples from CF patients, a cocktail of CF1_20Nov10, CF1_20Dec107 and CF1_20Dec110 was added to two sputum samples derived from CF patients and spiked with known amounts of a bacterial strain which is sensitive to this cocktail. The titer of the phages in the different sputum samples was measured following overnight (O/N) incubation. An increase in phage titer represents successful infection and amplification of the phage within the bacteria. An increase in phage titer, above 1 log was detected when the sputum samples were spiked with the known sensitive bacteria and the cocktail of phages, at an MOI of 1. When the phage cocktail was added to the sputum sample without bacterial spiking, no increase in PFU was observed when compared to the initial PFU levels. No PFUs were detected in sputum samples spiked with bacteria but without addition of phages.

[0409] Although the invention has been described in conjunction with specific embodiments thereof, it is evident that many alternatives, modifications, and variations will be apparent to those skilled in the art. Accordingly, it is intended to embrace all such alternatives, modifications and variations that fall within the spirit and broad scope of the appended claims.

[0410] It is the intent of the applicant(s) that all publications, patents, and patent applications referred to in this specification are to be incorporated in their entirety by reference into the specification, as if each individual publication, patent or patent application was specifically and individually noted when referenced that it is to be incorporated herein by reference. In addition, citation, or identification of any reference in this application shall not be construed as an admission that such reference is available as prior art to the present invention. To the extent that section headings are used, they should not be construed as necessarily limiting. In addition, any priority document(s) of this application is/are hereby incorporated herein by reference in its/their entirety.

What is claimed is:

1. A composition comprising at least two different strains of isolated bacteriophages, each capable of (lytically) infecting a bacteria of the species Pseudomonas aeruginosa (e.g., Pseudomonas aeruginosa present in a Cystic Fibrosis patient), wherein at least one of said at least two different strains of isolated bacteriophages has (i) a genomic nucleic acid sequence at least 90% (e.g., at least 91%, 92%, 93%, 94%, 95%, 96%, 97%, 98%, 99%, 99.2%, 99.4%, 99.6%, 99.8%, 99.9% or 100%) identical (e.g., in the combined coding region) to one of the nucleic acid sequence as set forth in SEQ ID NOs: 1-10, and/or (ii) at least 90% (e.g., at least 91%, 92%, 93%, 94%, 95%, 96%, 97%, 98%, 99%, 99.2%, 99.4%, 99.6%, 99.8%, 99.9% or 100%) identical genes (e.g., in the combined region) to the essential genes of a bacteriophage selected from the bacteriophages listed in Table 2, as set forth in Example 7; and
wherein optionally, said at least two different strains of isolated bacteriophages have synergistic redundancy effect, based on either (i) time-to-mutant (TTM) that is at least 10%, 20%, 30%, 40%, 50%, 60%, 70%, or 80% above the longest individual phage TTM with respect to said bacteria, or (ii) normalized area under the curve for OD600-time plot (AUC) that is at least 10%, 20%, 30%, 40%, 50%, 60%, 70%, 80% or 90% smaller than the smallest individual phage normalized area under the curve with respect to said bacteria (or a mixture of more than one of said bacteria).

2. The composition of claim 1, wherein a first of said at least two different strains of isolated bacteriophages has a genomic nucleic acid sequence at least 90% (e.g., at least 91%, 92%, 93%, 94%, 95%, 96%, 97%, 98%, 99%, 99.2%, 99.4%, 99.6%, 99.8%, 99.9% or 100%) identical (e.g., in the combined coding region) to the nucleic acid sequence as set forth in SEQ ID NO: 1 and a second of said at least two different strains of isolated bacteriophages has a genomic nucleic acid sequence at least 90% (e.g., at least 91%, 92%, 93%, 94%, 95%, 96%, 97%, 98%, 99%, 99.2%, 99.4%, 99.6%, 99.8%, 99.9% or 100%) identical (e.g., in the combined coding region) to the nucleic acid sequence as set forth in SEQ ID NO: 2.

3. The composition of claim 2, comprising at least three different strains of isolated bacteriophages, wherein a third of said at least three different strains of isolated bacteriophages has a genomic nucleic acid sequence at least 90% (e.g., at least 91%, 92%, 93%, 94%, 95%, 96%, 97%, 98%, 99%, 99.2%, 99.4%, 99.6%, 99.8%, 99.9% or 100%) identical (e.g., in the combined coding region) to the nucleic acid sequence as set forth in SEQ ID NO: 3.

4. The composition of claims 1 or 2, comprising:
(i) a bacteriophage having a genomic nucleic acid sequence at least 90% (e.g., at least 91%, 92%, 93%, 94%, 95%, 96%, 97%, 98%, 99%, 99.2%, 99.4%, 99.6%, 99.8%, 99.9% or 100%) identical (e.g., in the combined coding region) to SEQ ID NO: 1;
(ii) a bacteriophage having a genomic nucleic acid sequence at least 90% (e.g., at least 91%, 92%, 93%, 94%, 95%, 96%, 97%, 98%, 99%, 99.2%, 99.4%, 99.6%, 99.8%, 99.9% or 100%) identical (e.g., in the combined coding region) to SEQ ID NO: 2;
(iii) a bacteriophage having a genomic nucleic acid sequence at least 90% (e.g., at least 91%, 92%, 93%, 94%, 95%, 96%, 97%, 98%, 99%, 99.2%, 99.4%, 99.6%, 99.8%, 99.9% or 100%) identical (e.g., in the combined coding region) to SEQ ID NO: 3;
(iv) a bacteriophage having a genomic nucleic acid sequence at least 90% (e.g., at least 91%, 92%, 93%, 94%, 95%, 96%, 97%, 98%, 99%, 99.2%, 99.4%, 99.6%, 99.8%, 99.9% or 100%) identical (e.g., in the combined coding region) to SEQ ID NO: 4.

5. The composition of claim 1, wherein said at least two different strains of isolated bacteriophages in combination target at least 40, 45, 50, 55, 60 or 65 different strains of Pseudomonas aeruginosa from the list in Example 1 of Pseudomonas aeruginosa.

6. The composition of claim 1 or 5, wherein at least 25 different strains of Pseudomonas aeruginosa from the list in Example 1 and/or at least 36 different MLSTs of Pseudomonas aeruginosa from the list in FIG. 2 are targeted by each of said at least two different strains.

7. The composition of claim 1, 5, or 6, comprising at least three different strains of isolated bacteriophages, each capable of infecting a bacteria of the species Pseudomonas aeruginosa, wherein each of said at least three different strains of isolated bacteriophages has a genomic nucleic acid sequence at least 90% (e.g., at least 91%, 92%, 93%, 94%, 95%, 96%, 97%, 98%, 99%, 99.2%, 99.4%, 99.6%, 99.8%, 99.9% or 100%) identical (e.g., in the combined coding region) to one of the nucleic acid sequence as set forth in SEQ ID NOs: 1-10, wherein said at least three different strains of isolated bacteriophages in combination target (i) at least 70 different strains of Pseudomonas aeruginosa from the list in Example 1; and/or (ii) at least 52 different MLSTs of Pseudomonas aeruginosa from the list in FIG. 2.

8. The composition of claim 1, 5, 6, or 7, comprising at least three different strains of isolated bacteriophages, each capable of infecting a bacteria of the species Pseudomonas aeruginosa, wherein each of said at least three different strains of isolated bacteriophages has a genomic nucleic acid sequence at least 90% (e.g., at least 91%, 92%, 93%, 94%, 95%, 96%, 97%, 98%, 99%, 99.2%, 99.4%, 99.6%, 99.8%, 99.9% or 100%) identical (e.g., in the combined coding region) to one of the nucleic acid sequence as set forth in SEQ ID NOs: 1-10, wherein (i) at least 40 different strains of Pseudomonas aeruginosa from the list in Example 1, and/or (ii) at least 52 different MLSTs of Pseudomonas aeruginosa from the list in FIG. 2 are targeted by at least two of said at least three different strains.

9. The composition of any one of claims 1-8, wherein said at least one bacteriophage is genetically modified such that the genome thereof comprises a heterologous sequence.

10. The composition of claim 9, wherein said heterologous sequence encodes a therapeutic agent or a diagnostic agent.

11. The composition of any one of claims 1-10, comprising no more than 10 different bacteriophage strains.

12. The composition of any one of claims 1-11, being formulated for oral delivery, rectal delivery or delivery by inhalation.

13. A recombinant bacteriophage capable of infecting bacteria of the species Pseudomonas aeruginosa, wherein said bacteriophage has a genomic nucleic acid sequence at least 90% (e.g., at least 91%, 92%, 93%, 94%, 95%, 96%, 97%, 98%, 99%, 99.2%, 99.4%, 99.6%, 99.8%, 99.9% or 100%) identical (e.g., in the combined coding region) to one of the nucleic acid sequences as set forth in SEQ ID NOs: 1-10, and wherein said bacteriophage is genetically modified such that the genome thereof comprises a heterologous sequence.

14. The recombinant bacteriophage of claim 13, wherein said heterologous sequence encodes a therapeutic agent or a diagnostic agent.

15. The recombinant bacteriophage of claim 14, or the composition of claim 10, wherein said therapeutic agent comprises an immune modulating agent.

16. A pharmaceutical composition comprising the recombinant bacteriophage of claims 13 or 14 as the active agent, and a pharmaceutical carrier.

17. The pharmaceutical composition of claim 16, being formulated for oral delivery, rectal delivery or delivery by inhalation.

18. An isolated bacteriophage capable of (lytically) infecting bacteria of the species Pseudomonas aeruginosa (e.g., Pseudomonas aeruginosa present in a Cystic Fibrosis patient), wherein said bacteriophage has a genomic nucleic acid sequence at least 95% (e.g., at least 95%, 96%, 97%, 98%, 99%, 99.2%, 99.4%, 99.6%, 99.8%, 99.9% or 100%) identical (e.g., in the combined coding region) to one of the nucleic acid sequences as set forth in SEQ ID NOs: 1-10.

19. A method of treating a disease associated with a Pseudomonas aeruginosa infection in a subject in need thereof (e.g., a subject having Cystic Fibrosis), comprising administering to the subject a therapeutically effective amount of a composition comprising at least one isolated bacteriophage strain capable of infecting bacteria of the species Pseudomonas aeruginosa causing the infection, wherein said at least one bacteriophage strain has a genomic nucleic acid sequence at least 95% (e.g., at least 95%, 96%, 97%, 98%, 99%, 99.2%, 99.4%, 99.6%, 99.8%, 99.9% or 100%) identical (e.g., in the combined coding region) to one of the nucleic acid sequences set forth in SEQ ID NOs: 1-10, thereby treating the disease associated with a Pseudomonas aeruginosa infection.

20. A method of treating a disease (e.g., Cystic Fibrosis) associated with a Pseudomonas aeruginosa infection in a subject in need thereof, comprising administering to the subject a therapeutically effective amount of the composition of any one of claims 1-12, thereby treating the disease associated with a Pseudomonas aeruginosa infection.

21. The method of claim 19 or 20, wherein the disease is Cystic Fibrosis (CF).

22. The method of any one of claims 19-21, wherein said administering comprises orally administering or rectally administering.

23. The method of claim 19, wherein said composition comprises no more than 10 different bacteriophage strains.

24. The method of any one of claims 19-23, further comprising identifying the strain of Pseudomonas aeruginosa colonizing the subject prior to the administering.

25. The method of any one of claims 19-24, wherein said at least one bacteriophage strain is genetically modified such that the genome thereof comprises a heterologous sequence.

26. The method of claim 25, wherein said heterologous sequence encodes a therapeutic agent or a diagnostic agent.

27. The method of claim 26, wherein said therapeutic agent comprises an immune modulating agent.

28. The method of any one of claims 19-27, wherein the subject has been treated with, or is to be further treated with an antibiotic effective against Pseudomonas aeruginosa (e.g., Pseudomonas aeruginosa present in a Cystic Fibrosis patient).

29. The method of any one of claims 19-27, further comprising treating the subject with an antibiotic effective against Pseudomonas aeruginosa (e.g., Pseudomonas aeruginosa present in a Cystic Fibrosis patient).

30. The method of claim 28 or 29, wherein the antibiotic comprises aztreonam, colistin, and/or tobramycin.

The application's sequence listing, which the Patent Office published only in electronic form, follows.

SEQUENCE LISTING (10 sequences)

SEQ ID NO: 1 - DNA, 44725 bp, Unknown
  source: /note="Description of unknown: bacteriophage strain capable of infecting bacteria of the genus Pseudomonas"
gtccggtttaagaacggcaaggctcagaaggctctgggccatacgcctatctttgatacagcccaggccccaatcttggatatgtttcctttcatccggaataacatcccctattggctcctgtgttctgaacaacggttgtatctagccgacgggactacaatcatcgatgtatccccaggaccttacgctgctagtataactaacagatggtctgtaggatcgttcaacggggtaatctttgctaacgatggggttaaccctcctcatcatcttccaccgtcagaatcaacctttagggtactccctaacttcccagcgaatactacttttaagaggcttaagtcctttaagaacttcctggttggcttaaacgctacaagtaactctgtagaaatgccacagatggtctggtggagtacctcggctgatgctggtggtgtacctgcatcttgggacccaacggaccccactaaagatgctggtcagaacaccttggctgataccaatggtgctatcgtggatggtgtgaagcttcgtgactctttcatcatctacaaggaagactctgtatactccatgcggtatatcggtggactgttcatcttccagttccagcagctgtttaacgacgtaggtatcctcgggccaaactgtgcagtagagttcgatggtaaccactttgtagtaggtcacggtgatgtatatgtccacaacggtgtgcagaagcagtctgttattgatgcccaggtccgtaagttcttcttctcggatattaaccctgacaactatcaacggacattcgtacttgcagaccacgtgaatactgaaatgtgggtatgctactcttccactaggtctgagccaggtaagcattgcgacagggctatcatctggagctggaaggaaaacacttggagtatccgagaccttcccaacgttctgagtggagcctacgggatcatcgatcctaaggtgtctaacctctgggatgacgaccccaacccctgggataccgatacttcggtctggggtgaaggctcttataacccagcaaagtccagtatgatcttctcgtctttccaggataagaagttgttcctcttcggtaataactctacattctctgggcagaacttcgtcagtacccttgagagatccgatatctatcttggggatgaccgaatgatgaagactgtgagtgctatcatcccgcatatcacgggtaacggcacctgcaacatctgggttggtaatgctcaggtacaaggttctggtattcggtggaagggcccctacccataccggattggccaggactataagattgacactaaacatgtgggccggtatatagccttgaagttcgacttctcttcggagggagattggtacttcaacggatacactattgaaatggccccgaaggcaggtatgcgatgagtcaaaagtacagcccttcgattccaccacaggaagaggaggaactgctgcccttccttaatgaagaattcgttagggttggacagactctgaatgacctagctgacggctactggggggtctctatggagccccctaagaagctcaagcctggtacagtaaagtattttgcccccggagtggtaggtccagtatccggcatctatcattacgacttggataaccaatggagactcgcaggtactaaacccaaggacctgccgggggattttatcctatttaccccacagaacaaccatcagccgatgggtacctgtgcctataggatgaacactgctaaggatgaagtgtggataaccatgctcatgtctggtggtaactacactaatggagctactgtcctggatcttccccaggcgtattggcctcctgctgagttgtttatcccggcttactccagcatcataccagcgcagagcactattacttatccacctccgtctgaccctaacgcacctccgttggatcaagtctttgatgttctcaacagggctactattcagactggtgtggttaaccaagcaatgtttaagatcacagctaatggccgtgttctaatccaaggaattccccaaggagcagtcttcgggggtacattcacattccccctggtggtgactccatgattcatttgattactcgtgagaatatagactccctcccgaccgtagttccagccctagcccgtgcttttaacaggactgacttgggtaagttctgggactttgagcacttggtgcattccctggttaattatgaggcctatgtcttctaccaggaagagagtgggtacgcgggagtcatccaagtatcccaggcccccttgggcaacatcctacacttcttctggagtggaaagatgcctgggaatgaaaccccggtagattactcggaggtagacgacttcctcggacagttcgcccaacgagttaactgtcggtttatccaatgcgaaggtcgtcggggctggaagcctaccctagagaaactcgggtacaccgaagactccgtatccttctatcgtgaggtaactccagatgaacttcctccaatttaacgtaaagcgtctgatggggttcgatgtagaggatgccctagattctcgggcttacaagggtggtagtaagaagcaaaagaccacctctgtctctacaccctatcagcaaggtaactataatgaactactctcgggtgccagtgattggctacataacgggggctttgaccccaattacggtggcgatccgaactttgacccggtggctgaccaaaatgctctccagcttagtggcatcgaagggctgggtggtctcgggggtgcccttcagtctctcctgggtagctcaggtgttagctctctggctgattaccttggtccttacgatcccaacaaaactggcttggcgaatgccattggtgcagccaacgaacagatgcaatgggacttcgacactacggtacgtccagacctgcgtgcaggagcaaccaacgctggtcagtatggtagttcccgagcgggtgtagccgagggtattgctaccgctaggctgcttcagaatcaacagaataacgcttcccagttggctttccaagaccagcaggcttacaaccagaaccggttgaataccctgggtaacctgtcggctattgctaagggcctcggctctggtaatgccatgcaggtagatgctggtagcatgcttcagaaccaggagcagcaggaaatcaacggggctctacagaagtgggcctatgagaataacgtcagcctcaacgacctcctcgcctacaaggagcttatctccggcgacatgggtggaaccaacgttactacctcctcgggtggtggcggtggtggtggcctcgggtctgccctgggtgctctcggtggtgcttccttgggtgctctcttcggtggcccagcgggtgcttctgttggtatgaatgctggtggtagggtcgggggccttctgttctaatggcctcccttcctcagaagctgttcgctataggacagaatataggtggtgggcaggagcgggtacagttgagccgtcaaggttcctaccgccccacccaccttgggacaatgcaatcgggagagtctagtggacaatcaaacccttttggcgcaatgggcggagcagcactcgcggctctcctcgggcaaggaagtgagccttcttcagaaacagtaccaagcttttctgtcgagggggctagaggagcaagcgaacgaggcgcagcggaagttgcagcaggtatgggagcgggagtgggaatccttcctagcgcagaagaactcggtttcggacagcagccaaagtctggaatcctaagtaaactatttggaggttaatcctatggccagcatggcttatgaagggtccccaattcgccctagcatcctccgggctgctcagaatgaactggacatggcgcgaatcgcaaggaacaaactgccgctggctgtagagggctcaggtattcctgatcgtgtccgtcgtgctgctcaggcagccctggagaacccagagcgttggtcccgtgcagcccaagaggttgcacctgcggctgaagctactggtcgcggtgccttgggtcgtatcgcaggtatcctcggtggtcctatctctgtaggtgtacaagccgctgtaaccccaggagaactcggggatgcagagcgtactcgtgcagaagaaattgctcaggctagccaagcggttgagaacatgggtcccgaggttgctcaagaggctaaccaatgggcccagggtgtaggccaacgtgcagcccagaacgccacaggaggccctacgggggccggtctgttgtcctatggggtaacccctaaccaaccctctatcgagcctgagatcaccccagaggtggcttccgaggctggtgctgctgtagcagatgaggaggaggctaatcgccaggtcatccaacagggtgcagccgagggtcttcgtactggtgctgtaagtcgtcctgaaatggcccaagctgtagttgaggctgatgcccagcgagaaggtgtagagcttaaaccccaagagcttaagaaccgggtgaacgaagagttgacccagatgaggactatggataatgatgacctgtctcgttatgtatcttacgctctcattggtactggtcttctggcttcggccctagacaagactggtaaagccggggatatgttcgctgcttcctatgagcgtcaactggatcgtaacctacaggctgggatcaaccagcagaagatggctgccgcagctgctgatcgtcagatcaaggaaaaggacctggagcgcaaggtagccaaggatgctgccgatgtacgtcttggtgaggggaacctgaaggttaaggaagggacccttgagcaaaccaagcgtaagactgagggcgtccttgataagtgggtcaaccaggctgctgtagatagggctaatctggagttgacccgacgtggccaagacctggctaaccaacgtgcccagctacaggctgaaactactcgacgtggccaggacatggcccaagagaatgcccagctaggttctgctgtacgactcaagaccgctaggattagcgctcaggcacgtcaggcagcagctaaggcagcccgaggtgagccgatcactaccaaagatgccctgggtattctcagtgaagtcaatggttctcaggctctgggtggtaagaagctgagtaagactgcccaacaggctattgcccagactgtccgaaatgaacttcgggctaatccgggggctaacccagtgggtattatccagcgggaggctgctaagctgcaacctacgggtaattggtttggtgctgatttggactatcctgccccaacccgataaaaggtacttgacaaagtatccaaaatgtagtataatagacctataggctcttaagattccttcttccttttgacttacttactaagaaggttagtatcctaagatacatcttaagagcctattctctttccagcaactagaaggtgacttatggctctttctccagaactgaaggccgctattgatgcggaactggctgaggtcaagggcctcgacgtagccgctgaattggcttccttgaatgagccagaggttatcgaagaggcaccccaggaagtagcccctgctacccctgagcctgccccagacctgagtgccctagtaactccggctgaccctaattctattagctctgcgattggtcgtggggttgataccatgcagtctaacatcggtggtactattgctacccttggtgaactgactggcagtgactacctgaaagactacggcacacagatggccgaggagaatgctcaggaagcgtcacagtacggaacccctgatgttcggtctttcgctgatatccaagatatcccatccatcggttcgttcctaaagaataacattgtagaggctctcccttcgatggcccctgtacttgctggtggtgccgcaggtgctaaggctggctctgtctttggggccccaggtcgtatgggtggagcgctcattggttccttcctgagttccatgggtatcaacgtaggtgccctgagtaaccagatgaaggaactagaccccgatcaaagcaacccatggaccgcagtcctcggtggtgctggcctctcggtactagacactgcgggtgctggtgttatcgctgccccactcctcaagcacatcggtaaagatggcgcttaccagatgttggtccaatcgggactacctaagcagaccgccattgaggctgtaacccaagctggtaaacacgctgtagtctctggtgtggctgaaggtgttacctctggtgcccagcaggccctccaggacactatcgcgtatgatgcagtagggcaggtacaaaccccagagcagttcatggataacctcctgacggctgccttcactggtacagctatgggtactgccggtggtgctgtatcctcgggattggacaccctgggacgtaatcaggactcagctgggtctgccgtagttgatcctaacgcccctgcggcccctcctaaggcttctgagcttgagcctaggggtacggtcaagaaagcctgggatgccctaggaaacgaagctacgtcccttctagagccacttgctaaggcctctcctatcgcccgtgagttctctgagactttcagggcagacatgagtggtaagcgagcctctggtaagaccatctttgaggatcaggaactccaggcaggtaaatggaactctgaactcgataacatcttcgagggtaagtcttcgaaagagatcgacaggattatctcagatacatccgcaggtgtcaataccccggaagctacccgcctacgtgctttgatggatgacgtaaggaacgaggctgttaaccgaggtggaatgtccgttggtactatccccaactatatgccattcggtctatcccctgagaaggttcaatccccagagttcctgaacgacattactccgtacttccagagccgacaagctgctgaagatgctgtagccaactggctggcagaagtctcggatgatactcgtggtaacactgcccctgaggttaaccgactggttactcagaaccagcagaccggggcttgggaagtagaccctcgctatcgtatccagggtgacccagataccctacgtggacggttcgcccaaagcgatgcagttcctaagtatggtcaactggaagagagccgggcctttggttctgtacctcaggagatcctgaataaatactccctgaacgatactcctaagaagcgtctccaggaaatccgggactacttcgaaggggcttcccaccggattgcctttaccgaacggtttggtatcaacggggagaaggctaacgctaagattgcatctgctgtagctgaggctcaacgggctggtaagcgggttactaaggaagaggtggatcggatgtatgacctagtggatgcctataatggtatgcacggtcgtatcaaagatcctaaccttaagaagctagcggctgttacgtcgggcgccctcgtgctctcaagacttccactcgccggtttctcgaccctgaccgagttcagcctacccttcgctaaggcgggggttatgcctacccttggggctgtactcccaactatgggtgaagtagtaagacaagcagcccgcaggatctacagtggggttccaaagtctgagaccggtcggtttatgagtgatatgaaccacaccctggcttctgctacttctctgatggctgatcgggttggtgctgaggtgtttaactctaccatccaaaaggcgatccgtggtcagttcctcatcaacggcttgtccatcctaacccatgttaaccgaatatttgcaacagagactgctaagcgggtctatcagaacaacctgatggatctagccgcaggtctccctttcagttctgccaatggtgctctgaaggttgctcagcttcgggaaatgggggttaatatcggtagccagcaggatgccctcaagttgatctccccagccactccatctgaagtcctgatggctaacaacgtcaagactttggctatgcgtcggtttgtggatcaggtagtcctcgaccccaccttcgctgataagcctatgtggatgagcaacggaaacgttcagatgttctccctcttgaagggttacccagcagcctatggtaacatcatcctaccgatgttccgtagacgactgagcccacacttcgctggttcttggaccaacgctggtatgggtgcagcaggtatagccttcactcttggtctgatgatgagcctggggtatctccaggatgagcttcgtcagctggctaagttcggtggatctagccgagaggatacccgtagtccagaacaacggatgatggacgtagtgatgcaacagatgccactccaggcttctatgatctacgacatgctgacgggttaccgtcgagggactacccccgcagaggtagtcttgggtccagtagctggtgctgcaactgagggtgctatggctgttggtaaaactatcgcttcgtttggggatgacccatccgcaggtgaaatctggaagttcttgtataagcaaactccagcacgtcctttcgttgccggtatggaagcgatggaagatgctctggatctttaaggagaagtaatatggcaacttatgtagaaactgatgccgctggtcctggtggccgtgcctacgtggttgatgtgccaaaagtcttccgacgtaatgccgatggtgatctcattgagattacctcggatgccggtcgggtgaatactaacatcgttaccgctacagagttcctccctgactattatgcagctaaggagaacgcagccctggtagtagagaacgttacagcctccttcccggagaacccctcagaggccgttatcccctctgtcctggtcaataccctcgtgggtgctcctggggaaacctctggtggtaaccgtgaccctggccacgtgattggtctgttctctgagaccatgattgaggcaccttgcggtactgcattcggtagtgaattccgagtagaccctcgtcgggaacacctgggtgtttacgtggctattaagcacgtgattggcccggatgaccaaaacggtggtactatcggggattacattatcgagcagtttgatgacatgcgtggtcctgtgaagaacattggttctctccaacagaactaccttgacccccgccttgtgactactcacctgggtggtaatgtggtcaacactgcacaactgaacggtaacatcacacttacccgacagaactctggtcagcacttcatgagtatgtcagctacggatatcaccgtgactttgggccccgatgtaaccccaggttgtgtattccactttgtgcaaggggctgctggtaagatcaaattctctgtctccccagacaaggcttggtacgctaagggtaatcagacggagactgatggtcaatttggggaatgcactgtccgagtgtatcctttcggtggtaccgtgggtaccttcaaatcggcagtttaattaggagttagattatggcaggttatatcgctgacaacgacggcaacagtgtattcgttattcaatcgaaggctattgctgtacgtaatgaagatgggaccctccgacaagtcattggcccgaaagattttgagcctgtgaaatgggaggatattgaggggaagccggagcttctggaggtgggtgctaaggctagcgaggctaagccaggtaactggaaacccaaggctagcgaagtgagtggcctagatgcagccatttcggcttacgtcaagggtaaggtagctgagatccccgtggcttcctatacggatactcacgaggcactcgtggataagttcaacacactgctgaacgctctacggagctaaagataaggccccttgggatgatacccttggggcctttttttggttactcgatggatacctacagtgaacctgcccaagataatacatcgatgaggagtctggatatttctcccagggtcaggagtaacatcagtcagctgtaccctacataaaccagcagggcaaacaaggctgctaccgcaatgtaggtccaagggaatccacccttacccttttgatctttctgcataacccctccaatctccgtagaatacagaagccctaaggtctactaggtctagcatcccttcgaggaattcaatctgtcttttagcttcttcagccagttcttcaaaggaaaaggccttcgcctcagccttcgcaagagcgctttgcgtctcttcaagtgctttctccagttcagcctttgtcatagtacaccaccttgtcactgcccctgagaacatactcagaatcaatagtccaactcatggtaggacatttgatccgaatcatcttcggagtaaaaccatcaactgtaccaatagctagatgggatgaggtgttcctgtggaccaggaagactacactgtcccctacctctagcttacgtcccactcggtctttcatagattaccccaagatatccggaaggtgaacgctggggatgtagaggatctccaggacttcgatggtatacatcccacgcttaagcccctcctctgcaccccctttcccaaacttcatatccagccagagttctgcggagatcggcgtcttaaacgccaacccccgttgaccgaagtcatgctcagacttaatgtagtacaggtctggcaagaacttactcacaggaattcctccacactcatcaacttgaggtcatactctccgtccttgtggttccggagaagggctacacctcgccagtggtcgttaccctggggccctttgtaggactcatcatgggtgtagaagctaccgactacaagcccgtggattcgcttcttgcctactgcctcgatgtggtacttgaatccctgttcgtggccttggacgaagctgcgcttgatcttattgaggcgatgctcggcactcccgccgtatggccgaccactgttgggattgtagaagtagtgggcgaaggcgacaccttcgataacacccacgtcgaggaaatcatggacaatccaatcggacagatcaaaatgatcgtacccaataaaaccttggagagcagggttagaattttcataccgcttgatacgctcctcgtggtttccgatgaagaagtgcatttctggtcggtagatacgcttcttacaacccgcttggtgttgctgtaggcggcgaagaggatcgagcagaactcgcatcgcatcattaccagcttgtatgtcagcgagtactcggcggccttcgatcttagcggtaccacggtcgtagcttgacagactgggcatgtcccaatggtccccaatatgaacaattcgcttggggcggttacgtgcgatccactccccaaggttcccgaggtgatcgatgttgacctcggatcgaacttgggtgtccgcaatgacgagagtgtcttcattatacttcttactcattagggaaggactccttgaaagtctctagagtaaaccagcggaagccgttacgctcggcccattccgccatggattgctttgtgccatctttacgcttggaaagccaatggcaagctgtattagggcgctcgaagataaacacaagttcagtatctggggggagagcttccctcacccagatgtacttagatgcctctgaagcttcctggaagtaccccttgacctcgaccaataggttcttcgtcgatccacagggttgtaatgtcgataccttgaagtccggcttgtacttgtgcttgatgacgtatggcaccggctccggcttgaactgcatccaaggcatcgtctcgtggacgatcttctcggtttcgctgtcgtacttcgtcccaatcaatgacttcagtttgggtctgaagaatctcccctgctttgccaatgagccctccttcttgaagcttacggacaaccgacagtgtactctcagtgaggatagagttagaccgaatcagaagccagatccaatcccctaggcacacccggaactccggatacttcagtttgatacgttggatatgggagacaaccttttcaacttggttgtcagttaggggctgagagtgatccagaagagggtctaggactcggttaagagtaatacacttctcttccttatcaaactcataagactttgtgcggtagatttgagacctcaagcccagccgatttacaggccaacatgcgatctcacatagtcctacatcgaactctgctgggtgggagtgagtagtcacgacgaggttgacgggtaggtcaacaccaatagattcccacacatcaaaccccgcaggatacccatcaggcttatctccagtcctacaccggaccttcttgtggcccagcttgttgtagaaccgagtgacctctacctctagggtatcatcatcacaggggatcaaccgtgggccgaaccggctacggcgagtatcagtagggtcctccacatatggtctacggacatagaggtcgatatccttaggtgcaaccccgttgtctgcatccctgagaaaacccccagcgaccttgtagtcagtgaagccaagaccttcgaggatctcaaagagaccttcacagatcctctgtgcttcctcaatagaatatttcttcatcgtcatagggaatctcccaatgtttcttcagtgagcagtgatactcgttaccggactgctgaatatcaagccaagagcggtcccgaatgaggtagaggagacgaaaattctccagaaggtactctttccaattatctccgtacttctgttggtaggcgtaagcgcaagctgcgaagagatctctctcactagaaagctccccaagcaaatctgccgctgtctttggtcccgtccctgggaggcctggtatgttatccacggagtcaccaacaaggagttgcccgtagaggaatgccgtaccgttgccctcaagcttccatgatttctgcggcttcttaacgccatacattctccaagaagcggagacccttccaagaccatcaacttgaaacggtcccaactccggctgggaatctccacagggccaactgtaatggtagcatcctgggacttggcggatatccttgtctctagaacacgctgtaaagttagctccctcttcagtgcctcgaatcccgagccagtcatcagcctcgataccgtggaaagtgattgctccccacttgtccttaagtctggctgacacggtttcccagtgatgaggcttttcaagaccgattcgagtacccttatattgcttgattttcgcaagctccagcctaaaatttccttggccagtaaggtagatttcacactcatctgcattcacccttttgataatttgttcgactttatcatcgacgagcttgtggacttcttcctcaggccatggcttctccacctggatatcgaagatgtgttccttcgacatagccacgtggcctagctcatacctaagaacgtcaccatcgataccagctatcatcacgctacctcttctacgacctgggactctttgagcttctcttcccagaagacacggagggcaaaggcttcacccttggctcggtactctgggtgctctaccactggattggccagtgcttcataccccttccagtcgtaatactcgctctcttgacgcttggctttgtccatagcttcctccgttaggctgtagcctggggcttcccccaggtctacatcgacgccaatcacagagtagttgctaggaacagtcttagcccttgggtccaacagaagttccattggattcctcctcttgctgaatgacgagttccagggacgctagggcgttccacacttcgtgataccggtggggtagtttactttgggggtccaaagtttttcccttgtgacgctcaaggaggtgtcttccgaaggcagcgtcatatcgctggacaccattctcgacagacctccaacccccgcgactatatttgctggctccgaagttagcaacttgtgccactgcatatagagccctcgggaacgcttcgaagatgattccaacatccaccttgccgctatcgagcttagcgcccggctcaccaggtttgattccattaggatcgacctctactttattattagatgcagctgtagaactcaccacccgtacaccccacactctctcgaattcaattaagcagtaggggcagcctgaccggcatacccccgactcatgatccgctaggcccttagataggagcgtcttcgtcatcgaacacctcgtcgaatacatcatcgggctcttcctcggtgaaggcaccaccgaacagcggatcgtcctcaccgtcaccaccggatacgatctcgtggagtcgtacaccgcgcagtcgcagggccgtcatagtacccttgcctcgtgggcccttttgggtctcgatcaggatgccaacttcaccagtagagccaccccacgggttggggccatcatacggcttgttgtccgaggtcagaaccaccggcttcattacagcagacttgcgctcaccgtcttgcatccaatccacgtgcttcttctgcttgaccttgaacaggtactcgccatcacgctcctggtatttgatggtacccttcagacgggcatctttggattccatctgttggaccagcttgtctgcctcttccttggtcggaatgcagatggttacttggtagacttcaccgtactcggtgtccggagttacgatgtaggggaagatcagcttcgctaccgggaaggtgaatcgttgggaaactttcttagacatatcttaaacctctcgtagggaagaaggtattataccacagagggggctgaaagtcaacccccagatgtatcagtgtgtgtcataccatgaacgaccagcgatagaatcactagccaaaggacagttaaccccgaggagctccccagcatcccgaacgcagacttccatctgcctacgtagagccaagagatcatctgggtggcattcccactgaccctcgtcatggatatccaagactttccaagcccgcaggtttagcctacgaacccgctcgtctaggagcaccatggcccacttcatgacaattgcacctgctgcttgtaggagggtgttcaatgccttgtggatcatcacgtcgccagactcagaacgtcgcatggttagcttccgtccgtctagcccttcgagataacccctctcggcttcctgcttaaccctctcaatcagtgcagcaaggtctgggttagcttcaaggaactgggcccggagtctagccccgtctgccctggtgcctccaatgatagtcccaatcttggcatccccagcaccgtagatgaaggcgtagatgaacgtcttagcatcgtcccgtgtgggaagccctgcggctatctggttggccgtgtgtacatcaccctcgaccacctctttggtgtactctgggttgttgatgtaggatgcaagcatccgaagctctagaccagcaccatcgtagcccacgaataccaattgattcgctgggacgtatacccggtactttcctacagtcttccacttacccttcttgagttcctccacgatgttagtgaagggcctaaccctttcgttctccccaagatcacggcggaggacagtccatttccattcaccagcctcaggtgtcccctggaacaacccacggatttcaggtccgaaaggagaacgagcagcggggatattgactactacacggtgcctcatgcggcccgtaggtgttgcacaggggttagcactcccctctaggcgtccatcaggcctcacctgatctaccagcccctgcaagagggaccgacggtgggcccaaaccattcgctgcatcaccagctttcccaggtctccctggacggtatccatcgactcttcagtcatcttcggagtcgttaggaccttacgttgcttttcgagctttctcttgacttccccaatggtagttttcccaggaatgatcccctggagcttcattcggagtcgtccagacttgctctgtcggagatcctcaatgtacttattcaaggattcattaaggtcagacccacgtagcttcttgccatcagtgccgacagtaatatccttgatgttccattggtcaggtatccacccctgatccagcatccagtccttgaacttggcagtcttaccaaggtcgaagggtacatactcgattgcagagaagggtccagatacctcgaagtgcccaagacgttgccatagtgactggagcctttggttcggcttaccactctttaggaatggcttgctgaaggccccagcccttacgatcatcatgggcatctgggggacagcctcaaggtcaatcttgaggattcgttcgctaagcacatggatcagccacttggcccgctgagtctggaagtagactccacgtttactctggcggctgatgatatcagctaccttgtgctcaacgaacagtgactttctccaatccacttaatcccccttaagacgctccgccagattctctacaactgtctccacagcttcgtgggatacaccctccaggtaggagaggtagtccacggtaccactgcggtccagcttccattgctgctccaggaaggccacagcaacttgcttgagcaggaagtcatctacccgctccatgaggatactcttgatcttgctcatgtaatcaccagtcgaaaatgaagtaggaacacccacgttcacaggccaggtctaccaggtaccaggacaggtcaatcttgcgctggatatccttaatgtcgctcagttcttcatcggacagattgagggtatcaccccgcttctccttaaggaattgaaactcccatttcttctcctcttgggagacaaccagggtatcccgaggatccagcttggtgcccctgtccacatagaagtcatcgtagagactcatatccttgtcacgaatccgggtgtttcgacgatccgagtaggaactcaggttcagatgagagcctgtgaagtagctcacccccaggaatccctctggcaggctcaggaacacccgacgcttctcccgtagggtaatgtggggactgctgaggaacttacggatgttagtcctttgtacctccatacccttatgtagggcagaagccatattacacaggtacttaccacggacatgtttggagtagcttacatggtcactcatttgtatctcctataggggtaaagcaacccccggcaccttaaggttattatatcacactttgctggatttgtcaagactatttgtggaaaaccctgtcataccacttgtagaagtattgagcagaggtaatcccaatagcacctccccacccggacacgaagataaaccatccgatatccaagtgggaggaggctaccgccttgatgtaagcaaactgagccagcgtgatacaccaagacactacgaacccagccttgatcttgtcatcccggagcagcttagagttcaatcccaggaggaatacctggaagaatgcactccagaagatgacaaggacttgtagagctattgacatgactcgcatacctcgggatctaggccacaggcactacccaaggggaagtcatcagcatcgatctcggggccaccccagctaccagagaactccttctccagggcaatctccttccgtgcctgatcctccaggctttccttcttactcgccatcgttaatctcctccacagaaacccatccacggacagcaccgatttcattggctcggacggtcatggggttggcatcagagtcacccgcgaagaaccggatgatatccaactcgattcggtagaagtctgcgttgaacaccttggtgtcctggaatcccacgttaactcgatacttcttcactcttacctcccagcagttcttccagattagccagtaccttctgggccttcaggttgtcctgcatgacctgggtacgctccgccttcaggagactgatctcgttgtagatccgttcagattcctccgaagactcttggataaaggtcttcaggttaaccagcaccttgtcgaaggaactgaggatgttgctgatgctaagctttcgattgaacatagtgagtcctcgggggcccgaaggcccctcttcatttactttttcttgcgaatgcctttggccttacgatcgcccacccgaccaccatcagcagcgttagaagaacggccacggacgcgaaggttagaatccccgttaccgccaccatctttaacacgtttgatatgatcgacaacctcgtcggttccgagcttcctgccaagacgcttttccacctttcggcgggctcggtgccgctgagcatctcctgacttagagcccacgcccgtttcgccgcgtcgaatagccagttctctctcacgcttgtagttcctcactcgctttttagccaatctacagtcctccattcaacaagctcttgccaagtcatgccgagtacccggaggaggtagttgaacagtgcgtgactgaccactccatcctgaaggcaatactcaaacatttcctctgagaacttggagaagtcgttgaagtcacccttgtgacacttcaggaacttaccccaggctcccagggaatgaccctggggcctatctggccaagtcaacctcgatgcaaccaaggtgtcatagcttcgatctgggggtatgataatcccatgaagtttctcaaggacccggttgtcgtagtcaaggatgttgtgaccgactacgaactttgcatgggcgatgatcctatagaacacatccatttcctcgggccggaatccccggactaccccagtcggaatgtctacaacaacagcgcaccaaagccttgtgaccgtattgaagaggccgtccccctctaggtcatagataacgtaatcaaattggggtgtcatcgtcagcaggtacctcgtcgtaactgccctcacgttcaaccaagcgacccgtctctgggttatacttggtaaacactaggccagtattaccgtagttcctgtccttgattacacggattctgctctcgtgcttctcttccccgtcagcctgcttgttccgctcgaagccgatcataagctgacaccaacgctgcatagctcgggagccggtgaactggctttcctttacctcagcgccctcctcgtgggtacgattacccttgggcgggttaaggtgggagaagatgaagatccgaagacccagctcatcggccatacctgcaagctctgtacagatacgggcgatctccgtgttcatttcggaaggactaaggtggttggtcatggcggtcatgttatccagcaggatagtcttcacatccatggctactgcccagaagcgaatacattccttgatatgatcccaatcgttctgacccttgttcttccacatgaagagcttgccacggagtttacccgcagcgtctttaaaggcttgctcatcccactcgatatccggtcggtggaagggtacgttagctaccttccccgcgatattcttcagtgtcatggctacctgctcttccaacaggaatgtccctacgttctccccgtgctcaatgcaattccaggcagcaatctcgtgggccaacagggtcttaccgatgccagtacctccacctaccccgatgatctcaccatcacgctggccataggtaaggttggttaggccctcccacggataactcttgccccacttagggggctccagagcctcagcatatacctcatcgacagtcacggagcagtcaggagacttcaccttactaccgaatcggatcatctggtagacctcatccccccgattacgcatgagcatgtcgttagcatccttcagcgggagctcgacaaacttacactcagggtacagggcacgtaccttctctactgacttacgaccctcgtcatcagcatcatggcaatagatgacctcgttgaaccgttcgagtacaccagattcctttaggaatgcgatatctcgtccagcggaaccaacaccagaggaccagctaatggctgcctgacgcagatgcttccacttctcgggaagtttcgactccatgatctgggccacagacatagccgacagttcatcctcgcagatgactaaccgcaggtgtcccatatccttatgccgaagggtattatacccgaaggggtctacaccgcccttggggctaccacgatagtagaaagccttggggtctaggattcggacgttaaacgctcggtactccccatcgcgggtgcgtggatagtaatgctcgataacgtcctcaccgttttcttgtgatagaccaacacgtaccccgtatcgttcagcgattgatttgctgatcttccgagtatcgagggctttaattggatactcaaggacttcgttgacttcatggatgatatcctcttcggacttctcccttcgttcaggaaccttgaacccttcttcgagaacttcatagtggccgcaacggttacaactaccgaagcgggtacctttctctttgtctacgaacaagatgaggtgattacctgttttatccccacctttagctcggcaactcggacaggccgtatcaccgataatctgcttcacttattcctccatctggctcttgagcaccaagctaggtacagcattgacgttgcccggtagggtcttgtaaggagttgttacgaaagtaccgtagaccttctccagttcacggaggcggtcctcgatcttcttcagtcgctcccacatgaagcgaataccaacagactcgtcacagtacccaccgtagctggtctcgggactatccgaggcctccgggatcttggagacctcgatggagtcttggaggtgtcgttgggaggcgacaagtcccaggatctccttgaggagcatcttctgggcatgtagctcttggtgtccgaaggtgttcggggtatcgcggtagacttctactgctttgtctacggtcatttcattcattatactgctccttgtcgttttgccaggtgtgccttccagtcgccatcttggacgatatccatcgccatatggctatcctgatggtacaccagggccttgattcgttccccgttgattcggaagtccttgagggtacgatcataccaacccggataaccctccagggcatccaagttttccagcatttcctcccccttctcaccttcggggagttgccagatttcccctacgatgagatcagcgcgggaggcgaaggagaggatggggaagcctccagcggagtacatcagaccccgctcgcaggatacagcattgccgacaaactcggccccttccagaaggtagtggttgtacaaaccagacaggagagtaccataaacgaaaacacgaacagccattagatagtctcctcgaagattttgttgaagcccttgacgtaggcctccagggcgctgccttctgcatccaggcccggcgcggtgttgatttccaggacaaacgctcggccagtggcgtgctggaagatgatatctactgcaccgaagtccagtccagctacctggatagcctcggcagccgcagacaatgcctgctctgcaccttcacggtcagccgcatcgttcaccccatagacccaaccgccggctacgttacggacgatgctgttgccgttatcttcctcgccatcggcgcgacgacggagcttgacttgcaggaggactgcttccccacggatgacatggactcggaactcggtacgcttaccgacgattccctgggtgaacagttgtgccctggtaatcacttccgggatgtgggtgtgaccgtagatgtgtaccgggtagtggccttgacggcgaaggttatcgattgcagtaacctcggcgtcgttgatcgaacacaccagatggataccacgaccgctatggccactcagatcagtacgtgcatacatacgaccagtgatattgaggacacccaaggcatcttcccagcgctcggtccaacggggaatcaagtgaggggcattgtcctcgaagtggcggaagaactccagcttgttagagcaacggtaaacatctgccgggtcgttgaggaacacaggggcgataccctggagtcggctagcctctgcaccaacggtcccccagttgattaccgcagtacccgcacgaccacggtaggtagatccctcggagcgaaggattcgagcacccagggcgttacgaagggctacagcaccagcagaggggcgggaacctttatagatatagaacatggcaaatctcctgtttctgttgagggtagtagtgaagccagcaataacccctgaattcctaagtcagatcccatgtacacatcttaggaaccggcatgggtcggccaggggttattactaacgcactaccttactcgaagtagtcttcgaagagtcggtcgatagcttccgcaatgactaccggggccggtaccaggaattcctcgtccgggttggcatcattgagttcctgctccttgactcgacggatcgactggatcttgtccagggtgtcacgggagaagggatactttcgggttgcgtcggtctccatctggatcactacttgacgcttcatcgttacttgggtcattttgacctcctatttattttcgattacacactcgccacagatgaactcgcactcatctaggctaccagtgaacttggcaccttcgtataccgtcagatgacgattacgctggtcatatgcggttgggatcttcccgcaagatgcacacccttgggacacgaagtcccgaaagacatgcacgttgttgaaggtgtggccttgcaccttcagggggtaggtgatgttggccggaggggtgttccccgaggtgccgccgacttgaaccctgggtttagaatgggatttcgtctccgatgagatcgttccaatcctcaacactggggtagtctccccaggagtcggccgatgctttgggtccaggcagcttaccgccagatcctcgacagtaactttgagatcacggtcttggccgatgaagtatgcgttggagatactccctcggaggacggtgtatccgtggaccttggcgacgttgatgccatgagcttcgatgagaaggttttcttcacgctcgattccagtgacagttccgtactcgcttccgtttgcgtaggcctcgatcttgacaacatcgaaggtgacgagttgccggtgcttgaaggtgctacctgctgcgtcgaggttgttgttgatccggagggtgttccttgcgtacgcatcgccagacgttccatacgacgagcccgcttggctgcctttcgttcccgcttggctgccttggcttcggctgtagtcatcgtagtccgagacaccgacgtagcgactccaccatgccgctgtttgcctttcgctttcgggaattgggaggtccagaaacgtgaccggagtggtctggggttctgcaccctttcgcactccggcctccgtgaacgggatagttaccaggacttcagccttcagttcagagatgggagaacgcaggcggatcttagcgttgggtcgctccaggaaaaccttgagcatcccaggctcagacgcccatacgatagtcccggtggtggtaaccgccatgaacagaggacgatcctcgttacggatgaagttcaggctacgttccttggagtcccaccagacaaccgcagcagcaccagagaacttctcctcgaacgtcttcttggcaccgtggttggcaatggtagcgcacagcatgttcgaatccacgttgtacttatcattgccatccagcaggtgcaggccccaggtatctacggtgccgttatgtaccatggtgatgtggtctacctggaaggggtgggcattcccatggtccgtcttgtcgcccatcgtggcgtaacggttgtgacccaggtagatgcgagcccgacccttgtccaggaactccttggtttcaggatcagccaggaagtcgtaggcatctactgcccgcttgtgaattcctacctcgttcttaaccgggtcgatcttggccaaaccggtggcgtgagcaccacggataatatccacggccaggagggatttgagaagagcgatttcgttatcactcgcgttagttgtggcacagaagcctaccaatccacacattgtatttctccttagtacatatttggttcgattgttacgccggtatggcgctgaaggtgctgcgggttatccatgagcgctacgaaggcatcttgaagagcctcttggtcctccagaaggtctcgtacacgcacttggtgaccaatacgacgcagagaggttaccgcagtgatcgctgtatccagtcgaacctgggtacctggcaccattgccaagttgtaccgctctgctgcaccatctagtagtcgtgaggtagtagcgcgagccaagagcagcctacgatccaaggcccgctggcgctcacgttcctgctcccggagacgacgctgacggttctgttcatcttccagaggatctaccccggagcgaacaaagcccatggttgctaccgcgagagtagcactggcgatccccatttcacgaccacccggagacatttcatagtccggagatacccccaggaagaatacatcacggaggttcacctcggagagcacctttaggaactcttccagcggggtttctgcgtgagccatggcgaaggccttgagacacaacatacgctgcatcaggcctaccatttcctgccgagtagtgagagcatgggccccacggaactcgatggacccgaagttgtgggttacctggaggttcaaggccgaatactttggccaggaggtaagacccaagactttctctcggtcaccttccggtgccaggatacggcgaccgaaggtctgggccagccagtcgttgctgaagaacgggatgcagaagttactatcccgacgatacggttggcagtgatcgaagaaaacatcctcgaatgccatgtaggtcaggaccgttcgttcataaacaggccactctacgtcccgcatatccatgtgcaggtgggtggagcaacggaaggtgggggccggaggagtttcctccatcgcactcacaaaggattcaacccgagtgattgccttctggccagaggcgggaccggagaagacatactccataccctcccgcagagagccgtcacccttcagatcccacccatccacttctggccagttgttgaggccttccagttcgacttcgaacccgaaggaagcaaccgcaggcagttcctcgtgatgttccggggcaatgatctggttcttacggaaccctatctgtgtgccaataactgacatagcaagtcctcctggttcttgaattgttcatctgcggacagtcggccatctaccatctgaccaaccttcacccccttccaatgaactaccccatccttgatgaagaagtcccggtgggatggggcagagatcatttcctcggcctgggtgaagattcggatcatcatttcgccagtgatggcctgttgggcatggttcagcaggatgttcctggggtccacacccttacgctgagtccgattgttcacgaggaaggatacataagtatcacgaaccccacggccaaagacgtcatagtacccactggagggccgcacgctttctacctcgctgtagacaaccccaccgtagtagttactgccgtcggggcgatacacattacccaggagacgaaacccgtcgaattgacggtcgtcaccaatggactcggtatcgtccacgtacactacccgaggctcgccgtcaacccggaagaaggcataggtggaggagtagtacatgttgaagtccccggccaaccgatggcgattattcaggtcattcatacttcacccccagtgcttggagggccgcaactgccgcagcgccgtcgttctcgttgatgatccgctggacttcatcaccggatacgatcgacttgtactcctccaggaggtgcttggaggtgtaggcttgcactgccatttcatagacccactcggtcaggtctacagagaagatccagaagttcgacaggctacggtactcgccgccgtagggcttatagcgcattgcgccagccttgccgtacagcttcttacgctgggtgtcaccatcgaggatgacagaggccaggcccaggaggtagtcacacatctgcatgacttctcgggtggtagccttggtgactcgctcgatgtggctgaagccgatatggacgtggccgccagcagttcgcagggttggaggggcatccttcggaatcacgttctgacgacgagtccagcagttgtagtccggctcgcaaccgaagacgtaagcctggggaccgaagctgcggaggagttcctcgtcgtacaggtgagaggacaggttctcgatgatgttcatgccgaatgggtggagcatctgggcacccaggagtcgaacggagacgatacgctccacgaactcttccttggtactggccgggtcgatgttgtactccagaagaacgttgtcttcttggacggcaccaccggctacagccaagggctcttccttggttccgccgatgaagccgatgacgctctgggggttacggtcgtagccgacgaaaacttcgggatctgcaccgatcagggggattgcgttgttcattgcatgttctccagtttttcgaggatttcggggatgctgtattggctggtgggtacgacctcggacctttcccgacctggatcacctacgtcaatggtgattggggccatgatggaaaggattcggtcattaggtacaccttcgagaccgtcgcattcgatcaggcaatcatccttggtatacccttgccacaactcagcgtcgtgatgcttgagcttgtccttgaactcttcgcgagtccgctcatggatgctcttaatatcgaagtaggtgatattcttgtatccacctacgataccatccatgacctcgcttatgtagctgtcatccacctcccagccgtggctctcgcagccctccaggtattcaccagcagtcaccgggaacatggccgggtagctgtcgcaataagcagtgctacctacctgggcacaagccgcgagggtgaggatctctgcattgcagcccaggatcttatcacgattttcctgggtgatgcgacgcatggaatcacctacacaccacaagcgatcgcccattcggagggcacagatgatggccgatgcgttcttcctgaggtccacccgtacatacactgcctgccggcggcctgggggtgagaagtggtctggatcgctgaggttcttgaggtcatcgttgtaatcccaccaacgggtaggccagtcgatggaagccgagagaataccaccatcggtgatcctgttgaccaaatcactgttcaggaactccaccagtttaccagaggtattctcgtgggtagataccaacaggtggccaaccccggtaacccaccggtcacccccaactctggaggtctggtcgcaataggctccgaagcagtttgtatattcggccattctcttgaccgagtagtggtgtacaacagagccctcggcgtcatagtacacattatgggctgcatacattcccatttgatttctccttggttgtcagaagtttttctcgatgaagtcttcgagggccagtgagagatcctttatgccgctcccccagccaacctcacccatgatccccagcttgaccactccgtgtttttcacagctactggtattaagccggatgaaccctcccacctcgctatctacggtcatgtagggatctttctttccgaagatggttggctgaggtgctatggtaactacctccaccttgtccaactgaatcttcaggaattcagaccgccagggtgtgccccttacccactcgcgtccacctggggcatcccgattgggcatccaacgaccgaatcggatagactcgtcagcggattggatgtggatatctcccttcttgagatcatcccaatcactactgaacatgtagttggagagtgggtacccggtgtagccattggctatcagtccgtggaaggacattgcgaggtaggacttccagaagccatacttctcagcaagcttcaggtgaacctcctcttcacgaccttggtagtcgagtccgctggagatcatcttgaagaggaatttcatgatggggtaccaggaatccagggtgtgtaccttggggttgaagtagataccgcagaccccttcttttccgtgatgggtgggggaaatcatttccgtcccgttagaatacttctcgaagggggaattcttggccttgctttcgtaagaccagaagtggaccttcgggattttgaaggccttgccgccgatggtgatggtcttgagttcaccttgggtacacttgttgagtacatcgatgaacttcttgcttcggcgggagcagatgaaggtccaaccgtcgagcttatagccgtgggttaccggaccttccattgtaccgaagcaggaggaagaggtcattaccttgagggctttaccctcgcccttcttgggtttcataccgaaggcatacttgatacgggccatttgttttctccttggttgagttagccagcaatgcccccagggagttcctaggggtattactaacgccctcttagaaggggccgcgacgctgctgcttacccttgtggggcgcaggaaccttggtggccttgtagatgccgccattcagggtcagctcgccggaggttttcagtcgctcgtagaagactttggctttcataggctgtatccttgctggtgatgagtggagtaaggaaggccatgcacaggctgatgaagaggactaccatcaggaggtagtaaatccaatcatcatccggtggcctcttgggggatccagcgattgctgggatattgtagatcgcgtcgtatatgtccgaagttacctcactggtacggtaacaccggcggttcccttgggtgcggtccccattgctgtccgtcatagtacatcagacctccaccgtgaaggtatggcccttgggaagtaattcgaagatatactctacccgccctggttgaatgtcccaactgttgccagtctccaggcatacgaagggaagcgtctcggtgtcaaggttcagtctgcctgacacgaagattcgaccacccactcggtgacgccagaagtgggggactacttcttgggttgtacgaacctttacttcacttttcagtcccgccaattcatcacgaagttcctggatctccatctccattccgccgcactgatggcgagcatcatcacccttcgatgctgcgtcgagtgccatagccaacgacttctccaattcctggatcttggccgtggctacttccagacgcttagcgtactcgtcgcggtcatacataacctgcatgaacttctcgaaactgacgatgggtttctccgactcactcatcatccacccccaaagtcttgacctttttcgccagccgcttactgtagttgtacaggtacttcaagaagaagagcccatagaagatggatgcaaccatcagaccggcacccaaagcgctagccgagattgaatccgaggtcatcaggtaggggaggacgaggaggtaaagaatccacagggggatagccaccagcatagtccgggtatacagcttgagcatttgatacctcacataataagtaagatataaaggtagaccttaagatatcctataggtataagagcaaccccggacaccttaaggttattataccacactttcagcagaatgtcaaggcctagatgttacagacctttacagagcttgtcgaggtattccgagtgctcgacagtaccggggaagtcctgcaaaccaccgagtcggcggatgaggacaccgtggttgatgaggatttctgccgcagcttgcacgttgatgacgtgaacccgaaccttcgtcgagtggttggcgctggaggcccaggggttgtagtggctgcccatgcggcggaggatggtatcggctaccacctgctcgttgttcacggagaacacggcggtgccatgaccttcgttgtactcgcgacggatgaccccgatcaattccttggcgaaaccacgggggctgaacccattggacgcaatgccggcgtagtggtcagcagtacccgaggggcccatgccaatgtaaatcttggcggtgcagcaggaggggaagtctttgcgttgcattagtaatctcctttgataattttgtagaaggatatgatgaagagtttcatcgggaagatgaggtaataggtcatcaacccgaagaggatcagtgggagtgataggggccacaacccgccaatgacgatggcgtgctcttccttaatccttccactatcctcgaatagggccaaggtcacgcacactcctacggcggccacgaggaagtagatgaagaggcacatcatgaggaagaaggccgccgctgcatagacgattacgctttccattagaacctcctgtagtggccgctgaagagccgcttggctgatatgaagacttccttgaggggcctgtagcaggcgaagtacaggatcatccccggcatggacaagggccagaagaaggacaggagaactgcccaatcacgatctgacccccacctcatcccgcactcttccaataccgcatagatcaggcaggatgtgaacccgtagaccgccaacccgaagaagatagtggcggagatcatgaggatttcttggatggtcatcaccaatccctcgcgcagttgcagcaacgaccctctttgtggccgaagactggcatacagtgggggcaatcctccccggattggatcatagcctccctggcgtgccgcaggtaagccgatcggctcgactccacacctacggctgccaaggtgaagccaagctcaccacggggctcctgggggccttcctgacgggtcatgttgaaccctcgtttctctactcgacgcttcattcgccgctcctgggccatgatttggccgatcattggtttactcttcatacggcccccacatcctggctgacacgtggacttccttcgctgggtagagttcaccatggttgtataccacattggctgcgaagatggagaaaccaaccttggtgataatcgtcacggtcccgccttgtttgaggtagaccgaatcgcccgtgaggcttacatacacaccatctttacgcttactgatgtgcaagtcgctacgtggctgggatactgctacggtgaaagtagtcatgggtcacctcagtggacccgatgaaccttgtggtccaccggaattccgagttcgtaaagggtttcggtgatgaactggccgaagttgatgaccttgaggtggaattcaccatcggcgctagccagccaatagacttgtggttcagtggatttcatagacgatacctgcacgtttgccgaagatcgacacacggatatgagtaacagaccagttagggtacagcttggggttaggctggtatcgacggatgacaaccttggataccaaccagtggtagatgtattgggcgggcgtcatagtacacaccctaggccggtgggccgaaccgatggacttcgacctctgcgtacttgacagtcacggggaagaacccgcagtcaacgtcgctgctgaagaatacatcgcccccaggtccgccgaagatttcgcagatgaagaattcatcattaagctccaggtactggaagactttggggttcttcttcccgtcatcctctgcgaagatgtacaggcaacccggctcaaggtcattccacatcacaaccttgatcttactggtaatcatgttgtattggagtttcatgttacacctcgtagcaattcagctcggcagttactgggtataccagactcaccggaggcatgtaaatgacgttgccagtcttgagattgagaacgggaacctcgtcggattcgcccttcatcttaatgctgcggagttcgcagaccatgtacacatccccaccgatgaggaaggtttgggacttaaccagagaactgagggttactccgttgcggggccacaccttgatatccatggggctacctcacgatgcaaaagggatgctgtccaaggtcgaggacaggacgaagagaaccaaccacgctaccagcaacaacccattggaacgtgagcgtatggcggcacatgcaatatacttccatgccatcaccgcgccctgttcttaaccaaagatgcacgctttgcccgaagcttgttcagttccagggttttaccaaggtgattgccgctggagttggtcaactcacgagttaccttggcaatcttgcggtcgatagcctcgatggcttgcatgttgcggctaaccttacgatagtcgttgcgtttcacgggatagtttccttagttgatttcccaagactccccagcctgcgaccataggtccggtgggggtttcggccaggaatcaccatggcctcatcagttgggttagttaatacccatctcttccttccagtcacggaagaagaagtatccgataccaatactggatacaatgatagcgatggtcatttgcttagtttccttatgagttcctggcgctcaacaatccaccggggatcgggatgcacccggatcatcctagtgagtttcttgagacggttaatcatctgagcacgttcatgggccgcttcgtagggtgacttcatttgatccacccgcagacgctcagacggataccatccgtagagtatacaccgcaggcaaatttaccgtccttaaaaacccagcggtaaacaacacccccttgccaacctacccttgcatcgcagaaaccagacacataaccccgatcttggatggaacgagcctgcccaaagatacagtaacccacggaaacctcctgatggtctatcgctacaatgcacggacctaccatgcactctagggatagacctggggcgcgtcatagtacacaccccaggcgcacccgccgtcacgctgccttcgcttcgtccttgacttccagtcgttggatcacggcgatacgctcgtccgcttcctggagctggcccttgtcgatggcacgctggatcttggccttgaaggcggcgatggcttgatcgagggagaactcgtcggccacgtcacgctctttcttgtacttgaaccagggtttctcggctgcacgctccagacgagtagccttgtccttggcgaagacgaacgggaattccttggccttttccttgtcggtattggccgcgatcttgccgttgtctacgaaccagtgggccagggccagccggcgggagccttgcggcatcgcgttgaacagcttgcatgccaacgagacttcaccatgctcgtcgatgtgcttgagaatgtccaggccggtagtttgaatcagcttgtccagggatgcaccacgctgggcgatggtcttgatgatcccattgatacgcttgtagtcgctcatagcttatacctcgggtttgatgtgggtgacgggggagttcttgcacttgctaggcttgtaccaattgcgcagcttagtatcttcacggttacgccaatcggtattcatcagagcctttcgcttgcgtgctccagccttttcctgaagggaaacatacttactgtccaggatcttgttacaattagaaatgatcccgaacttctgttctgcccgctgctgagctttgccaaggtgcccaatgttaataccttgagcacgagccttgcggctagccttgcggcgcagcttcttatcgatagcagcgttcatcgtttcatccttttggaatcatcagccgggacacacatcccgatacgataaaggggttagtcggcaaaccttggcattggcgtagccggcccctttccgcgttagtatcgctgttatggtctgtcctctggctatcctcgggagtcttcgtgtctactcgtccctaccttcgccagtatctaccaagcttcgccctctgcgctaagccattgatactaacccaacatactgtccatcacgattccactatggactctgctaattgtttacgctggagcaggcaaccagtcggaaagacataaggcggcgtctttcaaagccagcgctctaatcggagtatgcgctattccctcagctttcgggtttctcccctgttcagtccagggaccgtcgagggtacactttccccaggtggccgtcacctgatgggtgcccatgttagaggcttgggcttgccttgtcaaggctacgctaatcccgagggagtcatgcacgttatgccgttgactacggggcgaactataccgcttaaccgatcccttgtcaacccccgatacctgccggctttacacttgggcgacttgggcgctcttccttggttggcagcccccggatagcactgcggcaagggggatggtggcctaggtagaacgtgggggccattagacccggttccgcggggtttgtcaagcccctccggggtttcccccggtgcctgtcggtttccctcaaggcggcgccattacgccatattctttacggggttgtctactggtttttcatacagtctagggactatcagtcccccagcaaacccccggatatagacagtctttgactaacatagggtatcgtgggatgtcaataggggatcaagggatattccccccgatccaccccctgaataccctaagatttttcttatgaatacccttgggtccacccgatgaacggtagctcaaggggttgatccccggactagccttatggtatcctagggaggggctaggggctatacccctggggataggccacccccactttatctgggggactcctggggggatattccccagatacaccggaggataaaatagacttttggggtacccccggttataggccctggatcaaaggcaacccccgatacctgttggtatattactggataaaggggcaatagaccaggacatagacaacagaggtagacttggggtatacctatagaacaacctcagggagtacctatagaacctggatcaagggaaccctatgccacttaccccttaccagcaacctacgaagggtagtcttagggtatatctatagaaccctatcataccgttcgtcgggtaaatcatgtgattatcaaagaaatatcaaaaagtacttgacaaggtatccaaaatgtagtataatagacctataggctcttaagattccttcttccttttgacttacttactaagaaggttagttaccttaaggttatcttaagatagtcttaagaacccctttcccattccagcaaaacccctaacaaatccaggtcttgcgactaaaaataaaaaaaagatgaaaaggggcttgacaaaatagaaaaagtgtgatataatagtattataaggttgagaaattaaccttaagggttctttagaattaattgggatgtagctcagttggtagagcagggagccgataactctcaggtcgtaggttcgagccctaccgtcccaaccattatggcccattaactcagcggttagagtgctcccctgtctagggagaagccgtcggttcgaatccgacatgggtcgccattaactcctcgtagctcagttggttagagtgcctgtcttggacacaggaggtcgtaggttcgagtcctaccggggtgaccatttagagagatcggagcagtgtatgtcagacgaaaaggttgtctcgattggggctgctcctctttctgctaaagaaaagctagacctctattgtgaggctctggcggatggtatgaataagacccaagcatatatagccgctgggttctctcctaatcatgcgcaacgcaacgtagctgcataccatcgaaagcatgccgagtatatcaacgcctttatctctgagcgcatcgggagtcatgtccccatggcgcttcgtgtggttgtagagatcgctagcaacccagaagagaaaggtgggattcgcctcaaggcggcccaggatatcctggatcgtggaggcttcggagctaagcagaaactggagcttactactaagaatgtggaagatatgtccgcagaggatctaatcagtgaagttcgacgaattctcgacgaagagccagagttggctaaagtcatttctttcccaacctcttaagtaccttgatctaatcaagcgaagagaggggttggtactaaagtggtacaaagactccctcggaaaagtaactggtggttatggccacttgcaactccctggggaagacggaccgattaccctagcacgagcagagacttggctagagaacgatagtaaggcagcctatgatgcagcccaagggcaagtatctcagctgcctttttgcactccagagctattcgatgccctagttagcgtcaacttccagctgggtacagcgtggacgaagaagttccccaagacgtggaatcttctgaaatccggaaggtttgatgaagctgcttgggaggcagaggatagcctctgggctaaacaaactccagtgcgcgtaagggacctccaacgggccctgtggcgtgcatcaacagtaggtgacaaggtggtctaatggatacccaagagcggctacggaatctagtcagggagttggcggagcggcagaagtatttccgcatgaaccagtatactccttatgggtggcaagagaagtttatcgcagcttcctcgaactgcgcccagttgctggctatgactggtaaccgctgtggtaaaacctacaccggggcctttatcatggcctgccacctaaccggtcgctaccctgagtggtggactggtagaaagtatgatcgtccagtgaactgctgggcggcggggatctcaacggataccactcgggatattcttcagtccgaactcctaggagactggaagaaccctgaggctttcggaacggggatgatccccaaggaagatatcgtagagacgattcgtagggaaggtaaacccggatgtgtgcaagcagtagttgttaagcatgcctccgggggcctctcgtccctcatcttcaagtcctacgaaatgtcccaggacaaattcatgggtaccgccatcgatgttatctggctcgatgaggaatgccccaaagatatttatacccagtgtgtaacccgaacggctactactgggggtattgtatatctgacgtttaccccagagcatggcctcacggagatcgtgaaggacttcctccaggatcttaaacctggtcagttccttgtccatgcaagctgggaagacgccccacacctcagtccagaagttaaagagcagctactctcggtatactctccagcagaacgcaggatgagggctgagggtgttcctatgctcggatctggtgtagtcttccccattctggaagagaagtttgtatgtgagcctttccagatccctgaccacttccacaggatcatcggtatcgaccttgggtttgaccaccctaacgctatcgcctgtgttgcttgggaccctgagaaagacaagtattacctctatgatgagaggagtgagagtggtgagacccttgggatgcacgctgatgctatctacctgaagggtggtcaccagatcccggtagttgtcccccacgatgcctttaagcacgatggagcaacctctggtcgtagattcgtagaccttcttaaagatgaccacaacctcaacgtagtgtatgagcccttcagtaacccaccgggtcctgatggtaaacacgggggtaactctgtagagttcggcgttaactggatgttgacccgtatggagaatggtgatctgaaggtgtttaatacgtgtacgaacttcctaaaagaaatgaaaatgtaccaccgaaaggacggaaagattatcgacagaaacgacgatatgatctccgctacccggtatgccctgttgatggcttcccggcatgcacgtcctggtgctgtacgaaacagtggatactacaggagtgatactgcaaagttgacccctgattggtttgggagtattgtctaatggctaagcgtcgtcgcaagattaagcctatggatgatgaacaggtacttcgtcatctagaccaacttgttaacgacgcccttgatttcaactcttcggaactttccaagcagcgttctgaggccctgaagtattacttcggagagcccttcggtaacgagcgccctgggaagtccgcgattgtatctagggacgttcaagagactgtagactggattatgccttctcttatgaaggtattcacgtcaggcggtcaagtagttaagtatgaacctcagactgccgaagatgttgaacaggcagagcaagagactgagtatgtgaactacctcttcatgcgtaagaacgaggggttcaaggtaatgttcgactggttccaagacactctgatgatgaagaccggtgttgtaaaggtctatgtagaagaggtcctgaaccctaccttcgaacgattctctggtctctctgaggaaatggtagcggatatcctgtctgatccagacactgagattctagcacagagtgtggacgaggatggaacctacagtattaaaattcgcaaggacaagaagaagcgagagattaaagtcacctgtatcaagcctgagaacttcctggttgatcggttggctacctgtattgatgatgcacgcttcctctgtcaccgtgagaagtataccgtaagtgacctgcggctcttgggtgttcccgaggatgtactagatgagcttccatacgatgagtatgaattctctgatagtcagccagaaaggttggtacgtgataacttcgatatgactggccaactccagtacaactctggggatgatgctgaagccaaccgtgaggtatgggcctccgagtgctacacccttctggacgtagatggggatggtatctctgagttgcgccgtattctgtacgtgggcgactacatcatcagcaacgagccttgggattgccgtcccttcgctgacctgaatgcctatcgaattgcccataagttccacgggatgagtgtctacgataagatccgagacattcaagagatccgttcggttctcatgcgcaacatcatggacaacatctaccggactaaccaagggcgctctgtagtcttggacggccaggtgaacctcgaagacttgctgaccaacgaggcagcgggtattgttcgagttaaggccatgaactccatcatgcccctggagacccctcagttgtctggggaagtctacggtatgctagataggctagaggcggataggggtaagcggacaggtatcactgaccgtacccgaggtctagaccaaaataccctacactctaaccaagcggctatgagtgtgaaccagttgatgactgcggctgagcaacagattgacctgattgcccggatgtttgcagaaactggtgttaagcgtttgttccaacttctgcatgaccatgccatcaagtaccagaatcaggaagaggtcttccagctacgaggcaagtgggttgctattaaccctgccaactggcgagagagatccgacctgacggttaccgttggtattggcaacatgaacaaagaccagcagatgctccacctgatgcgtatctgggaaatggcccaggctgtagtcgggggtggaggtctcggggtccttgtctctgagcagaatctttacaacatccttaaggaagtcacagagaacgctgggtacaaagacccggatcgcttctggactaacccggattctcctgaagctcaacgggctaaggccatcagagagcagaaggaagcacaacctaagcctgaagatatcaaagcccaagctgatgcccaacgtgcccaatcggacgctatggctaagcaagcggaggcccagatgaagcaggtagaggctcagatcagactggctgagatcgaactgaagaagcaagaggctgtccttcagcagagagaaatggcccttaaggaagcggaactacaacttgagcgtgatcgtttcacttgggaacgggctcgtaacgaagcggagtatcatcttgaggcaactcaggctcgggctgcttatatcggagacggtaaggtacctgagactaagaagccctcgaaggcagtgaggaaataatcttgggagaacgttttggctatagtctagtgctgactgatgcggcacaacagatggtacgtgagaacgttcttcctgagcttttccgtattgtccaagaagagatcgagggagagtggaagtccacggcacctaaggattcagagtccagggaggccatctaccacgaactacatgccctcaaccgcgtacaacttcgtattcaggctatcctggattcgatcactctaaaggagtataagtaatggaccttgagaatcaaggcatggatgaattcgaggcagcggaagccttcggagatttgctcggtgatgaccttctggcccccggtgatgaaaccgtagatggtaaagtcgtaggggaagaagaggaggaagaggtagtagacgaaggtactccagaggacaccgaagagattgagtccgaggaggaagaagagggtgctgaggaagaatctgaggttgagtccgaggaagatcctgaggataaactcttcgagatcccgattggggatgaagtctacgaggttaacttcgaggaactcaaaagtggctaccttcgcaatgaagagtttgtaactcgacaagctgaactagaggatcagtatgcagctaaattcgaagagcttgatgctgaacgctctaatctactggccgagcttgagcagtatgctgttaccgctattgctggtgctaatcagtatgacaatgtaaactgggagcagcttaaggcccaggacccagagaagtatcaaacccttcgactggaagccctggaagcccgagaccgagcccaggctcttatcaaacgtcgtaacgacattaaggctatgcaagagaagcgagccgagattgtccactctgcctacgttaagcgtcagacagagctagccaagaaacttatcccggaaatgactacggatgagtcttggggtgacaagattgtgtcctacggcaaatcgattggatactccgaggatgagatccgagggatatctgatgcccgccaactggctgtactcgatgcagcacgtaagtgggctgaatctcaggtccgtcgcaaggctgccctagagaagaaggaggatactgaactacctgccgcagttaagcctgctgctcgtagggcggaagcctcagagggttctaagcgggttaaagctgcccgcgctaatctgaggaaagaccagtcggttgaagccgctgctgctctcttctcctctctcgatattttctaatagaaggaaacgtaacttatggcaactccaactaatgccgtctcgactgtagagatcaacggtaagcgcgaagaccttatcgatatcatctacaacatcgcaccctatgacaccccgttcatgactgctatcggcaagggcgtagctaccgctatcacccacgagtggcagactgatgaactccgccagccgggtaagaacacccgagtggaaggtgaggatgcaaccatcaaggctggtagcttcaccaccatgttgaacaactactgccaaatctcggacgagaccctgcaagtcaccggtaccgcagataaggtcaagaaggctggtcgtaagaacgaactggcgtatcagctggctaagaagtcgaaggaactgaagctggacatggaatacgccatggtcggtgcccctcaggctaagatccagcgtaacaccactactccgggtcagatggcaaacatctttgcctactacaagaccaacggttcggtaggtgctaatggtaccctgccaactggtgatggttccgacactggtaccgctggtgacctccgtcttctgaccgaagacatgctcctgaatgcctctgaggccatctggcgcaacggtggtcaggctaactcgatccagacttcgagctcgatcaagaaggccatcagcaagaacatgaagggtcgtgcaactgagatcaccctggatgcctcggacaaccgcattgcgcagaccgtggacgtctacgagagtgacttcggtaagtacaccattcgtgccaaccgctggttccacgaaaacaccatgttcatctttgatccgaagatgcacgccctctgctacctgcgtccgttcttccagcatgaactggctaagaccggtgacagcgagaagcgccaactgctggttgagtacaccctgcgtgtaaacaacgagaagtccggtgctctgatccgcgacgttgtagcccaggtctaacccaacggggcccttcggggccctttgtttcccccttaggaggtacatcatgagtatccaatcgacttatgcaattgacgaagaccttgggctctttatccgaaaggatactcaagatgttgagtcaatcctgtccgctaacgccgaagagcgccactcgggtgtcaatagcaaccgcaaggataatatgcgcaaggtagcaagtatccccctggttgtcgtagaggcactacggaatcgccccatgtctgaaggtggtcccatcgatcttaacctgatcggttgtgacccagaccatgccgcacgatttacccgttggcttaatgaccgagataactatcggatgcggacctctgaggcacgggtgtaatgaatggctacgatcaacaacgtaactgatctcgctattgccgctatccagtggtctgaccgtcaggatcttacccaagaacttctgatgttgttcattggtaacactactgaccgtcttaaccgattgctacgggtgagggagaacgaacacttcgaaaccctaatggccttcggtggtggcattgagatacctgagcactttgttgctctacgatctatcacgggtgactcccttatcggtggacgtactcttcagtacatcacccaggataccttcacccattatgttaactacaactaccaacctcagggtgtaacctactacactcggttgggtaacttctggcgagtattccccgttgttcctgacggtgccccgttcattgtgaactactggactgtactcccagagctaagcctcgctaacccaacgacttgggctctgacgaagtatccgcagatttatctctatggtgtccttgagcagatttatctgtacaccatggatgaagctcggtcccagttctggggtcagaaactcgaacgggctgttatggaactccagaacgaggagaatgccgctgacttcgctagcactcgactggcgatcaaagacattgaacgttaaggagattcagatgcctatctttctaaaaaccctcgcaatcaaccttctggctaccctcttcccaaccaaggtaatcgctaagtccatcgtgactggtgctaaggctctggcggagaagactaactctaaggttgacgacgagttcgtaaaagtcctggaagacaaccttaaggagaagacggaggatgcaacttctaactgataacctgggcagcatcgtcagtgccctggtcgtatcctcggtagtgacggtaggttcctcggttgtcggtcagaatgttaatcaggctctgcttgaaagaaacatccaggccacggagaagctcacccaagcggtgagcgatctccagatttctatggcaatctttggggagcggtatgtcacccgaaaagaaatgaaagaagagataaaggaggccaagaatgggtcttgaggtcgcaacttatattaaccagttggtgcctacgaaccctaccggctctgatctgaagtcctttggggatgaccacctgcgactcattaagagtgctattaagaataccttccccaatatttctcaggctgtcactgtaacggcagcccagctaaacgcagtcgctgatacaacccagtatgttaaacctgggatggttatcatgtgggctgggtcgctggctcagatcccagcaggttggaagctttgtaatggtgtagggactacctctaacggaatccctgttcccaacctcattggtgcattcccctggggtatcgacggatcttcccaggctgtaggtactagaggcggtagcgctaacattgtatgggatgggttcactgaagggactgcccttaccctagcccaaatcccatcacacacccacacttggagaactaggggtgctactaccctcaccggttctgcgggtgactcgggtgctctgacgggaggctctggtaacgcagccaataccaaccttgagactggccctgctggtcaaggtcagactcacaaccatgcagtaaagatcaacatgccgttgggtaatatcccaccgttctgttctgtgttcttcatcattaagaactgaggtatacaatggccctagagagacaagaggtcaagaaccctacggggattgtgaccgatatcacccccgctgacctgccactggagaaatggtccttcgggaacaac

SEQ ID NO: 2 - DNA, 65780 bp, Unknown
  source: /note="Description of unknown: bacteriophage strain capable of infecting bacteria of the genus Pseudomonas"
ccgccgttcaatgatgtgcttgtatacttgctgaggaaggtggattctgaggtgactgatgaagaggcaatgattcaaatccgcaaagttaaggccgagcgcgcaaggatattgggcgaggatttctgatgtagtgatggagtgtacttggactaggccgccttcgggcggtcttttctttggtgaggcgtacattctattaggttgtggccgagtgagattcggaagctatctggtaattaggatggggtggcgatggtgtattatggaaagttcgtggacggtggatcgaggattttgtgtggtgagtgggtggattatggaaaatcgacgattctgactggatttttggggtcggccgcgccggtcttactggtaattaccgaaaccgggaatttgggtcgagccttagtgccgcgtgggcttgaagcgcttattcggatacttcccggtttcggatgcagccgcaaaagtatactacagcgaaaatcgattgcacaatcctaatagaaaaaatctatcacggacgttacctatctttaaaattaataaaattaatagtaatttggtaatttggtatactttggtatttgaaagcctcgcggcactaagcttgtacatatcccgtcaagtttccgattccagccagctcgcggcagggtcgccggaaacttccggacttccaatccatgggtcgcggcaacaccacggcggactaagcggcaaatgccaaaactcgacgaacggaaccggaaatttgggagcgcgacagaatcgctcagctggacatatttctaacattcgatttaacactcaatccaaacactcaccgccatcgcctcccgccaactgccgactcgatcctcacccaccagcggatcgcccgtataacatcctataacaccacctaacactcattcatcatcaaacccacccagacctacagcccacccacaagcagcccatagacgcgatccctggccccatagtacaatcgcgccatactcagtgtcgcggcagagcaccaggcccatccgccaccaatgccaccgcgacgactccagaatcgaactcagggacgcagcaccaaatgaccaaacactacagccccgacgatctagtcacgccacaggaattcgcagacccgcatttcgcggcgatcaaccaaaagcgattcgacctgtacatcgacctgcgcgtccaaggctacagctcctggcgggtcttccgggccatctggggtgaggagcacatggacggtcccgcccaggctcgcatcttcgcgatggagtccaacccgtactatcgcaagcagttcaaggccaagttgaacgcgaccaaaacgtccgacttgtggaatccaaagacggcgctccacgaactcctccaaatggttcgtgaccccaccgtcaaggactccagccgtctgtcggccatcaaggaattgaacgttctggctgaaatcacgttcgtggacgagtctggcaagaccaggatcggtcgcggtttggccgacttctacgcatcagaagccgaggctcagaccgcgaccgtcgctgctgcggccgaagccaatggctatgtgccggaaggcgaagagggcgatttcccgtccccgacgccggaaccgaccgaggaagaccgcgccaacccccatttagacataaaataacatcgttctaggcccgaatcggaccgaactaaggcgacggtagcgggaagggacgaaaaacgattctagggcggttctaggaagtcggagcctaaccctcagaaacgacaaagccccggactctagctcagaatccggggctttcttttgggcgccttattcgccagcttcgatgatttcgaagttgtatttgacgccttcgtgctcgaaagtcatcttgccagccgccttcagctgcatgcggaagcggatgtgtttcgaagaaggcaggccgaactcgatgaatgctgcgttggtggaccggaactcgccgcgcttgcctttgacagtcacagccacgccatggcgctgagtgcgtttcttggaaacttccgggtctttccaggagttggcgatggctgccgacaggtctttggactctttggctttctccggagcgttcttggcctcttcgcgcatcttccggatttcttccagcgcttcctcttcggtgatctcttcttcaggcttcagattctcttcctcggccttctcttcttccttcttcttggaagtgcgggttttgtagactttggccggggcttcctcttcctgaaaggcttcttcctcggccggcagagcattcaggatggcgaggcagcgacgctcagcagtcttgcgatcagagaagcgcttgacagtcgcatcggcgttgtgagcgttgtagaaggcgaccagttctttcatttctgcgttctggatgtcgccgaaggttttgatggagttggtcattttgcgatcctctgttttggaagatttcgttcgggcttcggtttgtcgccccgttgaaagagattatgcctaggtcgatgctgcgtgtctacatttattttagcagaatgatggtgaacccgacgaacggttgtcgggtgtgaaaacaccgcaggacgaggctgcggtgttttctggacgatggtgcgacggtcagaaagtcgggatcggctcgacgggcagatcgccgggcttgtcgttgtccgacgcgggcgacggactggacgggatggccccggaccgaagccccagcggttcaggccgcctgcttacctgcggagctggaggcgcaggcggagcttttggtgcttgtggaactttcggaactggaggtgctggcggagacatcggcccttctggaagatctggaagatctggaaggctcgtcgccgcgtgatcgacgccaacgaatggctctggaaggtcgatgaggctcggcaccggatcgaagcctgtgaatggagtggtcacgcagcgcatgttcggatgggtcggcagattgttcaggacgatggagtccgcccagacatacgggtttttgtggttgccgggtccgtggctgatgatctcggcaggaatatggccgttcatggtaagccattccgccatcccttgccgagtcagcgggcttaccacgatctgaccagtggactctttggcgatggcgaacagatcaccgaattcgaatccgatgattgtgtagttggacctggactcgccgacgaaagccagggtttcgatgttgtggtggatatcttgttcttcccagatgtaaagcatgatgcgctcctcaataaggctgcttgctgtattcgaccagagacattccggccggaactttgaagcggacgtattcgatcatcatcgccgttcgacgccgattcgtgccagactcgtcattaacgaagagttcgcactgatgcggaatgactcgcgtcaccaggtcttcgcctttcgaaccgtagaacttgatgtaggctgcgacgcctcgcgtcatgctcagatggatcgtttcgcagagtcgctgcgcggccgacgcgctagacagatcggtcggactgaccgtcacccagtaatggccactttgttctttatcggacataaactgccctccaatgagaaagcctctgccgagccgcagaggctggttgttgttagtcgcgcttcaacagaacgactttgtcatatgcgcgatatttaccgcgccagtcttcccagtagtcgccggccgggcaggtaagctccaaggtgatttcgtcgcgccagcattcgacagaaagtacaatagccttgttccttgctgcgccatctgcggcatctgctctgagcttaatcagaatttcgtcgccagttttcagctcatcaactctcacaactttggccatgacacactcctgtttgaagaggcgcggccggaaccaacccagccgcgccgatggattaacgtttgtgaaggatggacacagtgtccacgtcgaggatgctgatggtacggcgacggcgcggattgctgcgctcatgaatgcgaatcaggttcgcaactggagcttcgtccaccacccatacatcttccggcttctgcgtccggagcaggaccgtaacttctgtgttctgggcgaggccgttgcagatgaacgtgaacttggacgagggggttctgtacatttcgagattcctttttggacttcgggtccgacttctcagccggtgaagagattatgcctgatcatcgcagtcgagtaaagcacttgtgtaccaattctccagttaaatggaaccacagcgcggtatcgctgatcgctacgctcccacgccatggcccttcttgcttacatacttcgaaccacaagctgatttccatcctggccaggactcggccgaaggattcgagccgacgccggctggccaggatgtctacattcacccgtcgattaatttcgtaccggcgaccgttgatgacgaagactaggcgtagggtctgtccgtccagacattcccagtatttggtttcataccgaagccagtagcgcttgccagccgggcctaccatggtcatttaatcgatgctcctggccgcgccacgcggtccggtcggcggcgcaggatcgaaccgccccaggatgtagtcgggccggcgcgcttcctgaggacacacggcgagaaggcgccatcctgcgtccagggcatactggagttcgtccgtgcagcagtcttccttgagcaggagacggttgacgctctggagattcggaccagggatagcagagccggtgaccgagttccagccttcgatgccgtgcaccatctgcggttggttgatgtagccttcggacctgccagccaaccggctcgcggccagctccaggcgttccagcattggtcgcagagcagcttccgggtcaacgtcgtcccagagaaggaccaggctgatgatggtgtacggatagtcattgtccagatcccaggccgaagcggtcagacggcccaggccgatttcattacacataacgggaacgtcgttgctccaggtggacggctcccagttccgctcaccaggattcccgattgttacgccttccaggttccccaggagaacgtggagcttgctgacatattccgcctccaaggctttccgctcttcgtcggtctggttgtggcgatagaaggatggagggctgacttttgcatggtagagtttcatggttgttcctcggttttggaagacttgaacgttagagaatggtgtcgcagtatttctcgaaaggactctggcgtttcttctcgcagatcgcgcaggtgattcccaggtcgggtagatcgctgtaagtcttgccgagatacagccagcgcttgcacagactgcgaccgtccgccatgaagaaatggactttgcgagcgttgccgggttgcgcccagccgcttggtgccggcttcctgctcataccatcacaatgtcgatttcgctggcgaagaagttaacgcctactccatctgcgtagccggtgtaacgcagccgaatagtaccatcgatgtgggcttcttcgacgccgatgacttccaggatggtttcgtcgcagtgcagcttgacgaacatcttgatgccggagccaatcgccgcgaaggcgatctgcttgtacaggtcttgcttgatcatgctttgcgctcctgtttgcggatgtattctgccctggcttcggcttcgaacttcgcccaaagcgcgttgtcgactggaccccagggaccggtctgagtcccgtccaccggcgcgaacttgccaccggcgcgacgatacttggacagcgttctcaggctgatgattttctcttcttgggaatcgaattggacgatcacttgacatacttcccgaagtagcaggtgtggaggatttccaggcccttggagatggccttcagcttgattccgaaattcttgatcgcccagtccagatcgtggtgatagaactcgatgatgttgacgatttgaccggcgctgtagtggatgacgcgaaccttgccgttccagcggaagtcttcgcggctgtttacggcctcgactgcgatggtgtcgtttctgccgatggtccattttgagctagtcatgtcgcaatcctctttttggagtgtttcgcgtttcgatgaggtaactatacctcagtcacatcatcgagtaaagcacttttgaacagattgtctaaaatttctggaagacaaatcaatcggccgcgtcatcgatagcgaacgccgatcgcgccaggtcgatgatctctggccatgtcaaagtaaaggttttgccgtcatcacgaatgataattggagtctgcagcggctcgcccaccagcattgtgtaggtatgtttctcgccggatgcggagccgatgcgggtgcttaaggtgagcggggattctttgtgtacggtgccgatcatcgtttcgttcctcggtgatacccggagaatcgggcgcgttggattaggctttgccgcgacggattgttacgccgcattcagtagtcacttccttagcggcaggatcgcgaacaagataagcacaggcggctttgacattcaaagctcgggttgcgccgagtttgcaggaaagatcattcccctcttcgtcccacagatgggcaatgcgagagatacagcccttttctacttcagcttctacagttacggactggtcaatgttaaataccggcatcgctttctctccgagattgttccgtttcaatgaggtgactatacctcagcaacttcattgagtaaagcattttcttcagattatctgaaaccttttgaagtcaggaactgccgccagagccagtcgatgtgttcgttgcagtaacgctcgccatcggacgacatagccagagcaccatccttgatgccgaaccgggtgacggcgagccattcgaattcgaactggagcgttcctgggcgagggatatgggacgtggcgtatttctgcacggtcagtgatcctcagaaggtttcgcgtttgcgatagccgctactttctgcataccgaggcgatagaaatcggcttctttcctggctttggtaagctgctccatggcgtcgcacgccgtcttgtgctgggaattggcgttcttgatgctgccgtccaggctcttgtctaactcttcccgaagagccttctgcgatgctagctcggcctccaaatcctggattctgagttgaagctggcggttctgctcggcgaccttgtcttcgcgggctacgaagttctgcaggcggtcgacaagacgagtattttcgcgcaccagctgctgtttggcgactttggtccttcgcagttctgctcgcaatgcggacaactccagcgcatgcagatcggcgtccgattcttgcgactctgcggcctgcttattgcgcagatagtattgcccagccgcgaaggcgagcagtgctcggtctgtatccttaactgtcttggccatgaagtgggctcgatacagaggcgcgaacttgcaggcgtctgggtcccaggccagattatcggccacaggccagaatgcgcgaaagcttttcgcatcgacatgcgccttgaccgtctgcgatgcgcccgactcttcgcagatgatttccagagggacataaatggcgttcttgatgcttcggaaagaaatggtggacataacacaatcctcataagaagtcgcggccgggaccatcccagccgcatcgtaatcactcttcgccttcgtccgcgctcagccactcttcgaaggcgaaattcactttagactcgacccaatcctgaagctcatcggcgaactcgtcactgtcgatgtccatggcgattcccataacttccatgttccatagcgcggcattcagttcgaactgtaccatctgctcgccatcgacttccaacaggatgcggtctgcgacttcatagtcgtctacatcgaacagatggccgcccgccaggaggtgctggacgaaagcttcatcgaggttggtgacttcgatctggacttgtttggtcattttcgtatccttacttagcgactttgaattgggctttgaggttggccagttcagctttcagatcgatcatcgcctgaccgcgcaggccttccatttcagcctcgctgattgcgatcttggctgcgcggattttgtcgttgatttgatctttggtcatttcggcttccttttgtttgaagggtttcgcgtttcgatgaggagattatgccgacagtcagactggaagtaaagtgtctgatcgaagaaacttctgtacaccgacgaacggttgcgctcgaccgtctgctgcggtgtcgatatactcggcctattgcgaacaatggactgattaaatgttcaagctcaatcctgcactgcgagcggtctggcgaactcgtgcccgttacaaagtcatctatggcggccgggcgtcttcgaagtcgcacgacgctggcggtatagccgttttcctcgcggccaactacaagctcaaattcctctgtgctcgccagttccagaaccgcatcagcgaatctgtctacacattgatcaaagacaagatcgaaaactcagagtataatggcgaattcatcttcaccaagaactccatcaagcacaagattaccggctcagagttcctgttttatgggatcgcccgtaacctgtcggaaatcaagtccaccgaaggcatcgacattctctggcttgaggaagctcactacctgacacaggagcagtgggaagttatcgagccgaccatccggaaagaaaactctgaaatctggatcatcttcaaccctaacgaagtcaccgatttcgtgtatcagaacttcgttgtcaaaccaccgaaagactcctgcgtcaagatgatcaactggaacgaaaatccgttcctaagcgagacgatgctcaaagtgattcacgaagcctatgagcgcgaccgggggcaggccgagcacatttatggcgggattccgaagactggaggcgacaaatccgtcatcaacctcaagttcattctcgcggccatcgacgcccacaagaaactcggctgggagccggccggatcgaagcgcatcggcttcgacgttgcggacgacggcgaggatgcgaacgccactacgctcatgcacggcaacgtcatcatggaagtggacgaatgggacggcctggaagatgaactgctcaaatcgtccagtcgcgtttacaacctggcgaagatgaaaggcgcatcggtcacttatgactccatcggcgtcggcgctcatgtcggttcgaagttcgccgagttgaacgatgccagcccagacttcaaactgatctatgacccattcaacgcgggcggcgctgtcgataagcctgatgacgtctatatgaagctgccgcacacgacgatcaagaacaaagaccacttcagcaacatcaaggcgcagaagtgggaagaagtcgcgacccgattcaggaagacttatgaagcggttgagcatggaaaggtttatccatttgacgaattgatttcgatcaactctgaaacgattcacccggacaaactaaatcaactgtgtatcgaactttcgtcaccgcgcaaagacctggacatgaacggccggttcaaagtcgagtccaagaaggatatgcgcgagaaacgcaagatcaagtcaccgaacatcgctgactcggtgattatgtcggccattctgccgatccggaagcccaaaggcttcttcgacttctaaacatagaaaagcccggatcgctccgggcttcgggtcttactcggtgtggttcctggcgctgagtgtcgacgcaacggcctcgccgactcccagggcttcctggccggccgcgagcgcttcggcttccgactcgacgatgaaatcatcaccttggccatcgcctggcggaacctcgaccagcacggcttcttcgccttcgaaccgcaggtcataggtcttttcgacggacagaccgtaacgagcgttgagcgcgtcccagagctgggcctcataggtccgcaggtcttgcagagctttctggtggctgagcatggccatgtcaacggcccgttgcagggtttcgtccaggacgttgaaccgaatgcgaagagaacgaatccgctcgacgacttccgcatccactacatgtctttcgatcattacttttcacctttgctgaatgtaacgttgtagccgttgtcggccaggtaggtcagggcgccttcgaaggaagttccgacgaggtgctttagcttcatttcgcgttgcgcggccagccagaatgcagttccggagaactcggcacggccttcggccaagaccctgccatcaggcccggcgatccgtacatgcacggaagacagcttgatcggcatcagtgaatacctccactggcttgcgacggcatgctttcggcgcgtgcggcttcgcagtccgggcagggacatgcttggcggacgcgctccagctcgtcggcatccatgacatagagcttcccatcggcagtgtcgtgcgccatggcgatgttcgggaagtcggtggcgctcaggccggcgacagcgcggatttcgtcccaaagcaccagatgctcggcattcagtcgggcggcgagcgcttcgtgctctttagcgacgcgcgccatgaactcgtccatccggaatgcgaattccgcatcgatggcacgggccgaggccatggagctgagtcgaatcggttctttcttcatgatgattctcttttggttggtggtttctaatgtccatgcagattcaaggccggctcaacgcggcgaagaacaatacgatgaagaggagcgaaaagaatgcgaacgccagagatattccggaaatcagctttgccatgccctgcatctcagtcgccttggcagcgagtctggccttagcctcgataacttccggtagcggcgactgaacatattctaaggcctcttcccgcgctttttcggcctcgaccaacctagggtcgcgggccgagacttcgctgtgccctggcctcgcgggatgggcttgcagcgatggaggaagttcagcagccgcgactccatagtcggcgcaggcccaagcgatcccgatgaggatcgcgaggatggattggacgattcgcagcatcactttgtcgctagggaagttcatgatcaatcctccaccgaccgaacgatttccatgttgcgcccggcattggtccctgcattgaaggcgcgccgaccgtcgctatcgtccagacgcatgagcttcgtaacattgtacttcttgtagccaggatcgccgaaatgttcgtgaaccgcagcttccttcaccacaaccagagacgttccggcagaagataccagctccatacgcttcctggtgatggcctggagtcgatagctgatttcctgggtcgcggccagcttgaattgcgcggcaaccttgacgttgaaccgttcgaatccttgagctttctgatactcccgacacagacgatcaacggcctcgaccagggaattgaacatgttcaccgccagctccacgtccgacttgtagcctttaaagcgaacggcatggccccagcgtttggtggtgctgccgtcgcgggcgctcctggacgccttggccgatgctcggtgattgttgacgccaccggcgaaatccatgatgcagtcgttgtacgtcgcaacggccaccgagaagaatttcatccaattcgggattgcggaatagtaacgagtagcgatttgctcgtcgaactcttcgcgaatctcgccggccgcttcgaagtcgtgaagatcatatttgtccttcagcttcttcacgcgctcggcagcgatggccgcttcgtgcggactggaagagtcggccgccatggcggtcagcttgcggatgcggtctttcgctttctcgatggcttccggggtgaattcgttctggtcggtcatgttacgttccttttgtttgaagggtttcgcttttcaatggagctattctgccttcattcagaatggaagtaaagcaatttcttccactatttcggcatcgactggaagaaattccagatccaatcacctgctaccagcaagaggatgagggcggcaaagaacaagacagcggccgcgagctgtgcgcccggcttcagtttgggatggctgagcttgggctctacgggaacggccggagcgctagtgctgcaaccggcgtctcctgggccgtagccgatgccgcgttcacacgcctggagcgacaccagggatttaagatactcggtctgcttttgcgactcttcgtagatgccggcgacggcgaaccagagggcgaacactacggacgtacacacaacccaggcgccggtcagcaggagggccagcgggccgatgacgaagacggtagcagccaggacaattgcgccgccccagatgatgaagccggccagaccattagtgatgtcgacacagaactttttcattttcagattccttcggttacgggatggaggggatttgaaactctgcgccgccgagaacatcaatgacgacttcccagagcgtcggaacagaccactggtaacggtcgaagtcggtttcaggatcgacgcccagcgtcacataggaagtggcaggccatttatgaacattgcctttccgcatgagagtcgccacgcggccgtcaccgagcggattcgtcctgtgcggaacgtacgcagacatcgaatattgctgcccggcgtcgacaacaaatctttgcctctggcgcagacatacagagcccacaggattccagccgcgaccgccgcaagcctggcgagccgaagaatgctcataaccttcgtgagtcatttcgccgaggcaagccgagcgatcctcgtaatagttgatgttctccatcgatccaaccagcaccagagactcgaaatcgaatcgatgatcgtggatggccgagtgattgaagcaaagccgacgcggcagctccgggtgccaaacatggaggcgaccggccggaagttggacctgaatgaaccccaggccgtgcagagtgatcttgtccttcatcgggtcatggacggtgctcatggataatcctcagtagcagaaatgtattgtgagagttacgattgacaagccggtcgcccatagaagggcgaaccaggccatggctttgatggtcgtgtagatcatccgaagaattttccggcacagatcgggccaatgcccatttcgatggatgcgtggttggtcaactcgcgaccgcagcaggagcactgaccagtcttccgaccgtaggcgactgccgattccatcggcttttcgaacatcttcagaacgtcgtcgtgctcagtatcggtgcagtcgcgactcttgatgaatttgccattggtgatccggccgaggtagatgtcgcccaggacgtacaggctaccggcgttccggctgtaggcgctagcctctttcaccacgacgatgagcggctcctcgccttcgccagccaggcggattttcgggcgcttgattccagactctttcgccttctcaaacgctttctcgatgccggaaatgtccagagtcggcgcagcagcttcctgcgcggccactttctcgcgatacttggcgaggttttcgatggcgcgcttcgcagcagcgatctgattttctgtcaaggagccgtatttatacaacgactcctgaaggctctgagcgaagctgaaggaatttccagtccaccactcgatgatgtccgggtgcgcggcttcgaaggccttaattttgaggtcgcgctcttgcgcagcgctacagattttctcgatgcgcttttctgccgccttagcacggctcttggcgcgctgctccgggctggttttgtactctttgtatccgacgccgccgcaggcaaagcaggcgcgaccataagacgaagggccacggtacaggccggtgcctgcgcatttggtgcacttgtcgcgatacagcttcacttccttccgggagttcgggcgggcacccatggacacgtcttccagggtcttcggcgcttcgttgttgatctctacggtagcgaagtcatcacccaggtcttcgaagccggtgaacagattctctgctgcgttcatgtcgattctcctgtttggaaagttcgtttcgatgagttgactatacgccagaagtggaaaaacggtagcgatttctcactaccgttcgtcgggtcgaagacaatcaataaatgtcgctattgatcttgaacccatgctcagcgccgtcgttgtagtcgtactcaacataactgtcgcagtagtcgttcaaatgctgaatgacgcctagaacgtcgttcgcggccttgtgccgtttcgcggcgatggtcttggcgatgctgtcgccgacttccagggtttcggccgtccggcgatggatcagcagacggctccaaagatagagccggacgcgacgaatgatgtctcgatggcgccccagtcgtccgtgcaactcttcaatttcttgctcgcgagatttcactactcgtcgaagctgctgaacttccagttccaaatcggccttagtagccatgttcacctcaaaaaggaaaatcgtctgggactccaggaagttcgacgattattgttgagcctgatcgatccagaatgcatccgaccgagccggccctgtggggataggttctacacgaactataacaggtgacttccctgactattcgccaggtcgatcctccacaccatctgcaaattggcgggcgcttcgacttcagttttcgttcgtccaggacggcgcgtctgtcgcaggaaaggcagcgtgccttaaccgacgtaaccatgggtatagtcgatcattcggatgagctcatcatcctctgattctctcgacttcagaccgcccaaagagtccgactggccgtcgcatttcgcatcgatatccatcgaagacaggaatcctgccgatactgcggtgatatcaactttgtcgccggccttcttgaagtcttcgcactcagcatcgagggccacaattgcactcgcggccatgttcacatgactgatgaggtcggggaagatcacaggaacttcacgcgacatgccacggaccgtcagcttcaggactacatacttcatactcactatcccttttgtatgtgaggaaagaacttgctattttccggatggcgaaaatgctcggtcgcaggcggtctttcttccggacactgaatcgtcgaaggcgggaaaaccgcgccggcgataatcgccgcgaggagtgcagcggatgtagacatccagagggcggtttccaggctcacccgaacttccggacggcgcggcttcattcgctccaccctcttcccggttcataggatggtagactgccgccgcgaacccagttgtcccacatatggttcagaccagtcggtggctggggtggcggactgtagaatccgggagtctcagtgctgctcaggaaataaggcgtgcaaacggcctggacgaccaattggtgccgctcccacatcttatcaatcgctcttagcatgacgtcttcgcactgagccttactgtcgaaccgtctgctagtatggtccggcatctggacgcagccgtctccagtgcaaaggaaagcagtagcaatccatacggtgatactcgccatttcgtcaccctctttagttgatgagcagagtctattccatctgctcgccaggagtaaagcgcttttcgtcgggataaatgccgatgatgtctgcgtcgagcatccaaatctccacggacggatcgtcgctgctgatttggtacaggttgtacagctcccgtccgccgacagcgcgctcgcctcgcggctcaaccgccagaaccttgccgtgcccttctccgtgctcgtccaggtatatgacgtgatcgccgacttcatagctttctttcgtgacgaggcgtgaacgcgagctgttctgcgattccactacccaggaatccagcacgccgcctttcatgtcgcgaaacaatcttgccgatttgtcgcaatcgaatacgcccagaacttcgccgtctttcaacacgatatgtacgattggcaaaagagtattcatgtttaatctccattggttgataattagagtctaatctgccgaaaagttcccgtaaagaattattttctcataactgattagttgcaactgttaatctgatgtatatgtttgaatctcttttgaacgtttgatgtttcccctataataagcgcacacagtcaacaaccacgtggaactacaatgtttaaactttcctggatattcgggcgcaaaaaggataatgctgcctgttcggaatcggcgccggagaaagtcgcacaaatccctcaacacgatccgctcgaccccatgatcaagctgggaaggattcgcggctggaacgtcgagccggagaaaaccccggtcattcgtagtgtgaaagatttcctggagccgggcctatctgtagcgatggatagtgcgtatggtgatggaccaactccggccgcgaaggctgctgcgggcggccagaatccctatgtcgtcccgactatgttgcaggactggtacaattcccaagggtttatcggataccaagcttgcgcaatcatttcccaacactggttggtggacaaagcttgttccatgtctggggaagacgcagcacggaacggatgggaactcaaatcggacggcaggaagctatccgatgaacaaagcgcgctgatcgcccggcgcgacatggagtttcgcgtcaaagacaaccttgtcgaactcaacagattcaagaacgttttcggcgttcgtatcgcgctgttcgttgtggagtctgacgatccggactactacgaaaagccgttcaatccggatggaatcacgcccggctcctacaagggaatctcccagatcgatccatactgggcaatgccgcagctcactgctggctcgacggcagatccgtcttccgaacatttctatgagccggatttctggattatcagcggtaaaaaatatcaccgcagccacctagtggtggttcgtggaccgcagccgccagatatcctgaagcctacatacatcttcggcggtatcccgctcacccagagaatctatgagcgcgtgtatgcagcggaacggacggcgaacgaagccccgctgcttgccatgtcgaagcgaaccagcaccatccacgttgacgtggagaaggccatcgcgaacgaagaggccttcaacgctcgcctggcgttctggatcgccaaccgtgataaccacggcgtgaaagttctgggaattgacgaagacatggagcagttcgacacgaacctggccgacttcgacagcatcatcatgaaccaatatcagctggtcgcggccatcgccaagactccagccacgaagctcctcggcacttctccaaaaggattcaatgccactggtgagcacgaaacgatttcttatcacgaagaactggagtccattcaagagcacatattcgacccacttcttgaacgccactatttgcttctggcgaagtcggaagaaatcgatgtgcagctggaaatcgtctggaatcctgtggactccacgtccagccagcaacaagccgaattgaacaataagaaagccgcgaccgatgaaatctacatcaactctggcgttgtgtctccggatgaagttcgcgagcgtctgcgcgacgatccgcgttccggctacaaccgactcaccgacgatcaggcggaaaccgaaccgggcatgtctccggaaaacctggccgaattcgagaaggccggtgcacagtcggccaaggcgaaaggcgaagccgagcgagccgaagcccaggcgggcgccgtagagggcgcaggcggcccggttcccgccgctccacgcgggactaagcctctcgcgaaagcggccgaggaaggggccagcgaggccgctgaaccgccgtcgaggccggaccccaaggccgagctgcggaacttgttggtcgatcttttgtcgaagctccaagacctggacgacattaaggcgccggacggcgtagacatagagcacaatgatgcgcctggcttaaagcgcacatccaaacctggcgtgtctggtatggagccttcggtgttttcgtccaaccgcatcgtcgggcctcgtgatcattcggaactccagagaatcaaggtgaatggaataaccaccttgatcgaaaatccgcgcggaagcattcgacaaggcaaggatgggagttggcgagttcagatgaaacaccactacgggttcatcaagggaacgaaaggcgctgatggggatgaagtcgattgcttcgtcggtccgaatctgggatccaaacgggtcttcgtcgtcaaccaagtgaacaaggaaggtcagtttgacgagcacaagtgtatgctcggcttcaacaacatcaacgatgcgaagtctggatatctgtcctgcttccgtccgggctgggatggtctcggctccatccatgaagttgacctgcccgctttccgtcgctggctggcgaacggcgacaccaccaaaccattcgggggcgagtgatggcattcaaggcctccaaaaagcgcgagcgccgggcacctcttccagtcggaagagggaagcccataattccatcggcaggaatcgaggcctggtatcgaaagcagatgaaggatatgtccaagctcatgatctccgactatcgaaacgagattgagaaggcgctgtcccagcctgcggccgaacgtttcttcgccagagacgaatccgttaacgtcctgttcaagatgacccttcgaagcctacagcagcgatggagccgcatttttgaaggcttcgcggccaagatcgccccggagtttgttaaccggaccgaagaagcggccaccgccgcgaccctgcacagcttgtctgtggccggcgtcgatcagccaagagctgcgtacaatgagagcgtcaggaataccctggaggcagcaactacttacaaccatactctcatcaccaggattcaagaggaagtccacgagaagatttacacatcagtaatgttgtctctgacttccccaaatccggaagagcaaggaacttccggcataacgaacgcacttcgcaaagtcgggaagttctctgaagatcgaatcgaactcatcgcaagagatcaaaccagcaagctttacagttctctgagcgatgagagaatggcggaaaatggagtcgaggaattcgagtggatgcactcttctgccggcaagactcctcgccatacccacctggagaaagatgggaaaaggttcaagctgaatgaccccagactttgggagggtccgaaggccgaccaggggccgccaggatgggcgattaactgtaggtgcagaaagataccaatcatttgatatcgataggagcgctatatgccgttagttcatggcacttccaatgaggctcgttctgaaaacatcaagcgggagatcgaagccggtaaagacccaaagcaggctgcggccatcgcttactccatccagcgcagtgagaaagggaagacggcgaaagattgttcgcctgagctcgttgccgatcttcgcgccctggtggacgctctgtcgaggctcgtgaaatgaaccgcaagacatgccggcgccgactcgtggtcgatgtaatcagggccaatattcacggcggattcttcagcctgaagtttgccgccatcgatttggcaatcatcggcgtcgccatcttgatgacttttggccgataatgctgagaaaatctggattctgactaaaaattctagtccggatagccgcaagttaccgtttacggaaaatagcagtaatttggaaagcctactgccgcgaggctttaacagagctagttcctaatttccgatttagccgcgtgcttcaaaagtatatagcctgggaaattagaagtaacgttccaatagaattcatctataagtaacgttataatataacgtcaatctatatgctctagacgtattgaaattcaatttttaattggtaaattggtaatttggattagtttaggagttgaaagtctcgcggcagtaggcttagacaaatcccgtaaagtttccgagaccaaattaccggattttcgcggctgaggaaactggtaattagatcataatacaaattataatgtaagttaacagtcgcggctacatctaattattgttccgcttatttacccttagatgtactgcgtatataatacagccatagtccacgactcttcgaattaacgatgacaaagtcgaaaagaaaaattgacgaaaatggatatatgaccatcgagggctgcccgatcagctcttatggcgttttccagtattctgctggtcaactcggtcttccgggcgatccgacgcggattgtcaacgtatatcgcccggagtctgccgtcagcgatcctgagtacatcgaatctctgaagaatctcccgttgatcgacgagcacgaaatgctgtcgggattcgacgacgatgacgacagcgtggcccccgaagacaaaggggtggagggcatcatcacctccaacgcttactacgaagccccatgggctcgcggcgatatccgcatctattcccgcaacatgcagaatcagctggaaaggggcaaagaagacctgtccctaggctatagttgccgctacactgagcaacccggcatctggaacgggacgccttatgaagtcgtccaggacaagatgcgcggcaaccacatcgccctggtaaaagagggtcgtgtgccgggggccagagtattggatggtctgtgttttgaccatctcagttttgatttcagaccatccgatgagggtaatgaaatgagtctcaagaaagccaagcggaagccccctgtccagcgcgtagggcaagctgctgactcggcggtcgaagagttgcgcaccctgtggccgaaactctctgcgtctgtccagaagttcctgggcgaagaagagcaggagccggagcatcaggaaggcgccgctccggccgaaccgaccgacagcgagcacctgaccgagcatccgactctggaaggcgcccagaaggacgacgaagagcaggaagaggagccttccgttgtcgatccggccgtggccgccgtcgagccggagcatcaagaaagcgccgcatccgaaatgtccggtgaaggcgaagtcgccgaactgatctctcaggtcaaagccattctggctcgactggagggaacggtagccgaaggggcagacgaagagcatggcgaaggtcaagatgtcgtcgagggtttggaggagcagagcagcctcagcggctcgcaaaccgccagcgacgatggtggtgagagcaaggataacagcgaggaacttcctgaaatggcacagaagaacgcgcaagatgctgcaattcgcggtctctatcgcgacattgctgctaaagatcgcctctacaagcgtcttagctccgtggttggtgcgttcgatcaccgagctatggactcggctgaagtcgctgtttacggcgtgaaaaagctgaacatcagctgcgcgaagggccaggaagctctggcgctcgacatgtacctgaaaggcgtcgaagcctcgcgcggcgcggccagccgtcaatcgaaagcccaggattcggccggttctgctccgcagtgcgccgagctggacagctacctgaagggggagtaactcatgttccagaaacaagtttaccgccagtacactcctggttttccgggcgatctgatcgaggacggcccgaagcgggcgcggccgggtcgaatcatgtctctgtctgccgtaaatccggctgccaccgccaccggccccaaccgcatcagtcgcgctttcggttacgccggtgacgtcagcgccctcggtgaaggtcagccgaagaccatcgcggctcgtgcttctgaagtcgtgatcggcggcgccaacttcttcggcgtcctcggccatccgaagcattatgccctgttcggttcggccggcgactccctggctcccagctatgatctgcccgatggcgccgaaggcgagttcttcgacatggccaccggcctggtcgtcgaaattttcaacggcgccgcagccgccctggacctggactatggtgacctggtcgcctatgtccccaacaacctggctaccgccgacaacgcgcttggcctgccggccggcgccctggttggcttcaagactggctccatgccgaccggcttggtccagattcccaacgcacgcatcgttaacgccatcagtctgccggcccagtcggcggggaatctggttgctggcgttaccatcgtccagctcacgcagtaaggaggcgtcatgagccagatcagcaagacccattcgcgcctcgcaggccgcaatgcgaaacctttcgacctgaagaacatcaccaatgatgccgtggcatctctgcgccgcatcggactggtattcgatcacgctgtcgtccaggaccagatcaaggccttggcgaaggccggcgcgttccgctccggctcggccatggacagcaacttcaccgccccggtgaccacgccgtccatcccgactcccatccagttcctgcagacctggttgccgggcttcgtgaaggtcatgaccgctgcacggaagatcgacgaaatcatcggcatcgataccgttggctcctgggaagatcaagaaatcgtccagggcatcgtggagccggccggcactgcggtggaatacggcgaccacacaaacatcccgctgaccagctggaacgccaacttcgaacgccgcaccatcgttcgtggcgagctgggtatgatggtgggtaccctggaagagggtcgcgcctcggccatccgtctgaacagcgccgaaaccaagcgccaacaggcggccatcggtctggaaatcttccgcaacgccatcggtttctacggctggcagagcggcctgggcaaccgcacctatggtttcctgaacgatcccaacctgccggcattccagaccccgccgagccagggctggtcaactgccgactgggcaggcatcatcggcgacatccgcgaggccgttcgccagctgcgtattcagagccaagatcagatcgatccgaaggcggaaaagatcaccctggccctggccaccagcaaggtggactacctgtcggtaaccacgccttacggcatttcggtttcggactggatcgaacagacctatccgaaaatgcggatcgtgtcggctccggaattgtccggcgtccagatgaaaaaccaagagccggaagatgctctggtgctcttcgtcgaagacgtgaacgcggccgtcgatggcagcaccgatggcggcagcgtgttcagccagctggtacagagcaagttcatcaccctgggtgtcgaaaagcgggcgaagtcgtacgtggaagacttctccaacggcaccgccggtgcgctgtgcaagcgtccgtgggctgtggtgcgctacctcggcatctaacagatgcctattcaccaaaggccgggcttccggcctttgttcactctgactctaactcggttgtaggggccggttagggcataattactaggactacgccaatgactgtttatatcgtttcctccatgactcaatcggtgtcttacaatgcgtatgacacctctgatccgtccaatcctcgcctccagcgaaagattctgattcgcggccgcgcaggcatcgcatccgaaacttccggcttcggcgacatgatttccgacgaggccggacgtccgatctggaccccacagggcgattgtactgccgtgagcgattcggatttcgagctgcttcaggccaataagattttcatgcgtcacatggagaagggttatctgcgagtcgtgaagaccgacatcaccagtgaccaccagcggatttccaaagagactcgcaccatggagcgcgatggattccagcctctggatactactcgcctgcagcagaaaatcaaggtgaccacagccagcgcttcccaggaacaagagttccggatttaaccgagggtttcggtatggtgattttcgacgaacataagtttcgcacgctgtttccggagtttgctgatccagccgcttatccggacgtgcgcctgcagatgtacttcgacattgcgtgcgaattcatttctgatcgcgattcgccataccggattctcaatggtaaagccctggaagcctgtctgtatcttctgaccgcccacctcctgtcgctgtccacgatgcaagttcagggcgcggctggaggtggcgtcactgccggtgggacccagggcggtttcatcaccagcgctactgtcggcgaggtcagcgtggccaagctcgcgcccccggccaagaatggttggcagtggtggctttccgggacgccttatggtcaagagttgtgggcgctcctcagcgtcaaagcggtgggcggattctacatcggcggtcttccagagcgccgaggcttccggaaggttggagggacgttctggtgatccctggtgcgaatcttctgcgaatggccttcggggtcatcggtactcaaattgtgaaatatcgcaagtttgagcagcgagtgaagaatgatcaagctcagtacgtttccatgttcgaggagcctttcgacctggcagcgtctgttcagcgagtccgacgcgatcagtatgtccagtttaatctggagttccaacggaattacgttatgatcttcgccaactttgaaatggttgacttggatcgcgatgtggccggtgaccagttcctctggaccggaagagtctttcagctggagtctcaaggctcctggttttatcaggacggctggggagtttgcctggccgtggatatcggtgcggccaagctcactgatgacgggaaaccgactttctaggtgatgtatgtttgacggcgaactgatagcgaaactggttgtcgagttgaatgcggcgatgacatctgctcaagaggctttgcagttcccggattttgaagtcgtccagaaagctcagccgacccaacagggaacgtcaaccaggccgaccatctttttccagaaactgtttgacattcctcgcggctggcctgccaccgattggcacctggacaacacggcccgcaaatatgtagaaataactcgacagcatgtagagacgactttccagatcagttcccttcattggcagaatcctgaaataactcacgtggttacggcttctgatatcgccaactatgtgagggcttatttccaagctcgatccacgattgagcgcgtaaaggaactggacttcctcattcttcgcgtgtctcaaatttccaacgaagcattcgagaacgacaatcaccagttcgaattccacccaagttttgacatggttgtaacttacaaccaatatattcgcctgtacgaaaacgcagcatattcggccgatggggtattaataggcatatgagtctgaggcgcgattcagagctaatcgccgcgcacctccagatgttaagagccatgcgcggcaggtccgtttcagccggatggtattccacggctcgatatcctgacaaggcaggcggatcggtcggaatacaagtcgcgagaatcgcacgtctcaatgagtacggcggaactatcgaccatccgggcgggaccaggtatattagggacgccattgttcggggtcggtttgttggcgttcggttcgtcagaaacgactttccgggagaaaccgaggtaactaagcctcacagaattaccatcccggctagaccgtttatgcgatatgcttggaacttgttttccgcagatcgcgccgcaatccagaaccggatagccatgaggctggccagaggacagatcactccagatcaagctcttgcccagatcggcctggcgttggaaggatacatagccagaagcatcaggaccgggccatgggtggctaactcagcatctacggtcaggagaaagggattcaacagaccgctggtcgatacggcgcacatgcttcaatcgattagcagcagagtaacataaccaggagatcatccagtgatcagtcagagccgttatatccggatcatttcgggcgtaggcgcaggcgctccggtcgcaggccgaaagctgattctgcgcgtcatgactaccaacaacgtcatcccgcccggaatcgtcatcgagttcgacaacgccaacgcagtcatgtcatacttcggcgcgcagtcggaagagtatcagcgggctgcggcttatttcaaattcatcagtaaaagcgtgaattcgccgtccagcatcagcttcgctcgctgggtaaacaccgccatcgcgccgatggttgttggtgacaatctgccgaagaccatcgccgatttcgccggcttctcagcaggggttctgaccatcatggtcggcgcggccgaacagaacatcaccgccatcgatacgtctgcagcgacttctatggacaacgtggcgtcgatcatccagaccgaaatccgcaagaacgccgacccgcagctggcccaggctaccgttacctggaatcagaacaccaaccagttcaccttggtcggcgccaccatcggcaccggcgtcctggctgtggcgaaatctgccgatccccaggacatgtccactgccctcggctggtccacctccaacgtcgtcaacgtcgccggccaggctgccgatcttcccgacgcggccgttgccaagagcaccaatgtcagcaacaacttcggttcgttcctgttcgccggtgcgccgctcgacaatgaccagatcaaggccgtgtcggcctggaacgcggctcagaacaaccagttcatctacacggtcgcaacttccctggcgaacctcggcactcttttcaccttggtgaatggaaacgccgggaccgccctgaacgtgctgtcggcgactgctgccaacgacttcgtggagcagtgccccagcgagattctggccgccaccaactacgatgagccgggcgcttcgcaaaactacatgtactaccaattccctggccgcaacatcaccgtttccgacgataccgttgcgaacaccgtcgacaagagccggggcaactacatcggcgtcacccaggccaatggccagcaactcgcgttctaccagcgcggcattctgtgcggcggtccgaccgatgctgtggacatgaacgtctatgccaacgaaatctggctgaagtcggctatcgctcaagcgctcctggacttgttcctgaacgtcaatgcggttccggcgagcagcactggcgaggcgatgaccctggcggtgctgcagccggttctggacaaggcgaccgccaacggcacgttcacctacggcaaggaaatcagcgccgtccagcagcagtacatcacccaagtcaccggtgatcgccgcgcctggcgtcaagtccaaaccctgggttactggatcaacatcaccttctccagctataccaacagcaacacaggcttgaccgagtggaaggccaactacacgctgatctattcgaagggcgatgccatccgcttcgtcgaaggatcggatgtgatgatctaatggtttgcggcggactcgatccgccgcgaccttccataaatggagtgaggaataagcaatgatcaacatttctgcgttcggctcgatctgccagttcacggcaagcagaactttcccgaacggattcaccgtcaccgagtttgccgacgatgcggaccccatcgacagcccgccgttcactgcggccgataccggcgtcggcctcaacggtgacatggtagtctggaaccgggcgaacatcctggaagtcgtcgtcaacgttatcccgaacaccgagggcgagcgcaacctggcagtcctgctggatgccaaccgcaccgggaaagacaagtcgggcgctcgtgatgtcgtcggtttggtcgtggcgatgccggacggcagcaaaatcacctgcaccaacggcacccccatcgacggcgttctgatcaacgctgtggcaagcgtcggccgtctgaagaccaagccgtatcggttccgattcgaaaaagtgatcaaagccggtactagctgatgaagaaaattccgctgacagcagtccccaaccaggcgatctcattcaacgccggtagcagctattggaagattcgcctgtaccagaacatggacatgatgaatgccgatatcagccgcgacggcgtgatcgtttgctatggggtccgctgcttcggcgggattcctcttctccaatacagccatcagtaccgacctgactatggcaatttcgtcttcgaccgcgacgccgattggacattgttcggcgacggcatcaacctgttctatctggacggcgccgaattcgccgagtatcaggcgcttgccacgaggaaagaatgagcacatcaacgatcagaaccgggacgaacaacgatatccttttggacgacaatggaaacatggttatcctcagggatgtcgaagcgtgcgcccaggacgttcgggcggcgatgctcatgcgcaccggcgaaaacattttcgatgtgaactccggcgtgggatatttcgaatacatcttctcgccgcagaaaagctatgatgacgctcgcaaatccatcgcggatgcaattttatcctcgccggatgtgaccggcatcgagcagcttgacatcgacataaccggggaagtcttcggcgtcgatgcgaaagtcatcaccatccacgggcctgttaccacaggagtttgaaatgagtaccatccgcatccaatacgccaacggcacccaactgttcctggacggcaaaaatccgccgcccctggacccgctgccctcgtttaacccgtctgtcgaagatctggaaggcctggaccgcgaaaagaacatcgacaagggcgactcctcgccggccggtcttcccgttcccccggtaaacgtcgattccaatgtcgacaacggcggaaccatcccggctccggtatcgaccgacgctgctgcggccgaatcggccccggaaggcgcccaggaagctcctgcagcaggccaaggcgacgagaaaggcgccgaggaagccccgactacagcccctgtagaaaaggccgaggaaacggcctcgccggccgctgaagaggaaaccccggctcccgccaaggccacctctcgcaaaaccaccagcaagtaaggactcgacatgatcaacgtcagcggcttcggcacaggaattgtaatagtttcagcctcatcgttcccgatggggttttccttgtcgaagttcgctgatgatgagagtccgatatcctccaaagagctggagccgttcggatatgagatgctttatgacggcggcctattcgcctttgacaaggctgctcctctggaagtatctgtatccgtcatcgcagggagcgaggatgatattaaccttcgcatccttctcaattccaaaaagggatcattcagatttcttccgggcagcatcccggatatgacgactctcgtggccactcttcctgatggcggccgcaccgttctgtccaatgggactatcatcaagggtccggccatcgacaccatacagaacaccggacgacgcaaaggcaacacgtacacttttgttttcggtagctatcttggcgcccagactgcgcgtcaagccatttctaacgttatccaatcggtactggaggtggtctgatgttggggattttcaccagcctcctaagttcgcgatctttttcgattgtggaccaaaacacaaaccagctagttgctgcggatttgaggataagccgggtcaacacccggttttcttctgtagggcaacgccacatgctggaagatggtacgaccaagatggattccagaacgatccaccctatggaaatcatcgtcgaagtattttgcccttcaattgatgtcgtcgatcagatcaatcaattgctcctggatcgcgacacactgtacaaagtcatcactcgcggcatggtattcgaacggatgatgtgtaccagcgaagcgctcaatcagactccggatatgatatcggcgactcctgcacggctgacattctcccaagttctcgtccagaatcccaagcctataatgttccgaaatgcaggggactcttctatgatcgaccgagggctggccctagctgaagacgtggttggctcggccggcgatctgttcgactacgcagtgaacggcgtccagaacgccgcagacttgttctgaggtgccaattgaactctttcctcaagtctattctcaacacgcctactctcaccatacgcgatgatgttaccaaacttcctgtctggaagagtcttcaagtcaagaaagtggaaatttactcgccggcttccgtagtgtcgaaacctctggcgacgaaagaccagacggaagctcaagtgtacaccgaagctctggacattgatgtgaagaatggaaagatcatccaaccggtgcgactccgcatcaatgctatctgtccggacctgtccaccgttgaaagtatcatgaacgctttcaatgataacacctcgactttcgctatcacttctaagtcgatattggccgataaaatggccatcatgacgctcgatgtagatcagtctccagacatgttgaacgcggctgagatcaatatggaattcgagcaggttgagcctccagtattgaatgaattcgatcctgcgttccctcaagatagtccgacttatggggtacagattcaatctctttctgatgctaatttgctggatttgggcgccatcggcgattcgatatcttcggccgcaaaatcgctatataatcgcgtgaccagctacttctgaggatgtatcatgcttgaaatcaatcttcccgatggccgtcaaactcgcgtacaaatcgaggcgtggtcggcattggatggctgggacctccagcgccgtttcgtcgaatttgctgtaagccaagattccgacttccgccgctctttcaccatggaaatcctgggctatgcgaaagtgctgcttggcgacgatggcgccggcattccgctgaccaccgcggcagtcatcaacaaccacctcggccactggaagaacgtggaactggttttcaactctgttctcaagcacaatggcatcgacccggccacgcacgccgaccggccggactattgggaacaagtcggatcgcagatggccatcgcatttctggccgaggcgtccaagctcattggtccagcaatgaagatcgccgaaggactcgccaacaagccggagtgattcatgtctagtgatttggatgaattcatacttcggtatgaggccgatactgccagagccgagcgcaatctggagcgcctccagaaccagatcaggcgcgtgaacagcgcatcgacgagtggccttcaggatttgcgccacttcgcagacggcgcggccactgaactcggccgagtcgttccgcagatcgattctgtgacgagcgcgattcgcgggatgaacgcgcaactggcgataggcgccactggcgtggccctggtcgcggccggcgtcaaggcgttcatgaacaccagggaccagtacaatcagcagcgcatccaggcgatggacatcggcatcgccccggcacgcttggaagagtaccagagaaaattcgttcgccagtccggtggaaccatcagccgcgagcagggcgcggagatgaccaaaaatctggcagacactttccggcgtgcttatcgcgatatcgggcgagtcggcccggaagcgcgaattctgcgtatggccggcgttgatgtcgggagcttccaaaagggcatgcggccgctcaacgacatcattactgatctggccacgaaaatggccaagctgaagccggacgaaatttctgcctacgctgatgcccttggcgtctcgcgagactacctgagcaccctggctaagatcggcccggccatgggaaaagtcaccgagatgacgactgcggaactccagtccagggtccagggcgagtccaacattcagaaattcaacgatgctctggcgaatctcaaccagacgttcaccaccctggaaaaccgagtcggcgaaaagctcgcgcctgcgttcaccaagctgatcgaaatcatcgacaagatagtccaggctattcccaatgaagtggaaagcttcgcgaaggacaccaaatcccgttgggaagatggagtgctcgggaaggcgaccgttggcagtgatatcctatccctcctcagccccggcgccctgctcggtcgcctggcagcgtgggggactcgtcgcggcatggaagaatcagggctcatcgacaaggacaaggttcccggcgctcaaaccagcgaagacctggccaagaaacaagaagaccaggacaaggctactaagtccatgaaagagctagagaagctggctgaccagaccacgaagtctaccaatgattttgcggtggcgatcaacatgttcagtggcgcggtatcgtcgttcgcgaatgccgttgacgagcgccaagcttgggcagcctgggcgggggaaattggtcgggcggtcggtatgggaagcaccgcgccgacttcgcgggccaccggcgtctatccgcacgcgatctatgatcagtcgaagagtggcgcggccggacaggtcttcggcgagccaatcggcgcccagtctcttcgcaatcgcatgttctcgccgcagcgcaaggccgaaccggtcaccgttccatcgtacatcaacgatatcatcaaagatgcttcgaagatgtacaacattcctgagctggacatcaagaaactcatatacaccgaaagccgattcaacgccagggccaccagcgaagccggagctaaaggcctcatgcagctgatgccggaaatcgccaaggcgtatggtatcactgacgtatatgaccctcgacagaacatcctcggcggaacgcgcctactgcgggaaaacctagatcgagcaaatggcgacatgcggttggccttgacatactatcatggcggactcgatccgaagaactggggcccaaggactcgcgcatatccgggtttggtaatgagcgctccaatcgagctgatggaagaggctcagcgcaagcagaaggctgcggccatgaccgtcgccaacgagacgttcgccccggaaggcggcgacatggacattcgtccctatgatggcgggcgactggaaaccccagaccagggcaagaaggaagatgagcgccgcgaatcccgtcgatatgacgacagggttgtgcgaccggaaattcgcatcatcgaccgcatgccagaccgcagcgacggcgaaatcctcaagatgtctagacgtcaagaggccgaccgggcagattctggattccggaagttcccgaatcaagttcgcggcgagaccaagcagaacatccaggctcaactcactgcaggagccatcgcgcaagtgatcggcgttaaccccaaccagatcatgcgccgcgaaatcagccgttctgacttgctgttcggatacaaccaagccatcctgggcaagcaacaggagatcaaggccgccgcgaccgaagccaacaacgtattcctgtctccagccaagcttgccgaagccacggccaaggtgaatgccgcatcgcgagaaatggatattctcaggacgtacggcgagcaacttctgaagagcgctccagagcgcggccaggagctgaccatcggtcggatcgacatgttggtcaacgtcaccggcgcgaattctccggaagaggctcgtgagatattcagcaagcagactgcagaccagctgactacggcaatccaggacgctcaaaacgattccgcaactaagatactctactgatgaaaaagagaattctgcgagtaacattcaacatgccttatggacccgaagtcatccgcgaagatctggatgttcgggtccggattatgaaggctgcgttgcggattcagaaccgggcgacgatggaaattttcggcctcaccactcagctgcgcgagtctcttctgtcgcagttcaccgcgtggaagcaccggcaacgtcaagtgggcagggaagatgaattgatgatcaaggtgtcggtggaagccggctactctgaccaggggcgcgagcaagtttccagagtctttgtcggcgaagttgccattgtcgatatcatttctccgccaccggacattggaatccgcatccagtgctataccaggcaaatcgacaggacgaagaccattcggaatatgccgcccgccaacacgacgtttgtcaagttcgtcgagtggggcgcgaacgaaatgggattgaacttcatctgcgataccagttacaacgatcaagttctgaagaatccgggccggtctatcactgtcgcgtcggcaatcctggcgtcgattcaggatatgtacatgccggacgtggccgcgttcgtcgatgacgacatattgatcgtgaaggaccgcgataaagtcattcgtccggatgaggtgaccaacgtcaactcgtttgttggaattccatcttggtctgaatggggcgtggaattccagtgtctgtttgagacatcgattcgtgtggctggaggcgtagcggtcgaatctctcatgaatccaagtgttaatggtaactatgtaataactgctctggaatacgatttggccagtcgggatcggccgttctatatcaaagtcatggggagtccagcagcataatggccagggaaatcaaatcattcaacatgttcggagttcactatacttcgcggcaattctctgccgtcgatgggctcagcatgatgtcggaaattcagagcgtgccgccagaagaattgctcaagggtactgatgtattggcgcatccggaagaccatccggaaggcatctggcttccattgactgctgcgaacatcaatctttatgtcgttgatcgagcgaaagtaatagctcccgtacaagttcttgcacttctgtccgaagtggtaatcgactggaattttggttttctcaaagactggaccggagtcaagattccatccagatttgtcgaagatatcaaaagcgtgaagacggcacattcaccttctgtagttgcgagtttggtggcgaacggttcggcctctatgcgcgagttggaagagtattattcgactcaagatgcgtttaagatgatagacatcatgacggcgaagagcgtgaacgaggccttggcgtccgaagcatcgcacaacagaatcaaaaagggataattcctaaccgggcctgggaaggctatactagacctgccaaatcagaggctttcccatgtccaatatttctctaacatccgcaaaagctcccgacaggacgcgactgatcgccgctcttgacgctcggtcgcggcgggatgctctagatttcgaagtaatgataccggctcaggttgttcaatatgacagggccgagaatatcgcgacgattcaacctctcatcacctgggttgacacggaacacaacgccgtccaaaggcatcagctggttgatattcctgtaatttccatgggggctggcggcttccacataagtttcccgattcagcaaggtgacataggctggatttatgcggccgaccgcgacacgtctcagttcctggagtcgttgtcaatgtcgaagccgaacacaggccgcatccataagttcgagcatggcctgttcatcccggacgtattccgtcgatacaccatcaattccgaagattcggccgctatggtcatacaatcgacttccggagcgaccagaatttcgattcgcggcgataacatcaagataactgcgccgtcgaatgtcaccgtggatactccgcaggcgaatttcactggaagtgtgactatcgccaacaccctggttgtaaacggcgtcaacgtgaacaaccacggccacctcgaaaacaacccgcctgatgcccggacgaaaggcggcatgattgcttaaggagattttcatggcaagttttgatttttctgatttaacagcgggggggggttgtaatggctaactacaactacatcgtcgatactggtgtgatagtcgcagataccgccgacgttctgagcgacgttgaggccgagttccgcgccgccctcggtgccaatatcaacttggccgcgagcactccgcagggatcgcttgtcgcggccgaggccatcgcccgttccagtgtcatgcggaatgaagcgcgaattgccaataccataaacccgaacgtttcattcggaacgttcctggacgcgatctgtgccttgatggggatcgagcgcggttctgatctgtcaaccttcggctatggagttcaagtcaccggccgcagccaaacccgcatttccaccgggtctagggtccagactccggccggcgcgatcttcacagtgatgagcgatgtcacgatccctgctggtggtgtcgcgaccatcgatatcaaatcgcaggagtatggcaacattcctctgccggtcgggaatctcataatcatcgacggaacaattgggtggtccggagcaaaagtcatcgcctccactcgcgtcgatccgggcagccgccaaatgagcgatgcagagttgaagaatgcccgcgttaatcgattggccatccaaggccgcaactcgactatggccatcaaggcgtatgtgagcgccgttccaaacgtcacgtcggtgaacgtaatcgagaacaacaccggcgccgttcaagtggtgaatggagtctcgtttacccttccgtatgctgtttgggtctgcgtcgccggaaacccggataaacaagcagtcgccgatgcgttgtgggccgcccataacggcggaactccatgggactatggtgcgacgaacaacggcgtcccggtggacggtccgaacggcgttcctgtgcgcgatccggcgtccggtcgaaagtatgtcgtgaagtggaccactccaatcatgtacgatggatatgttaacgtaacagtccagcaaggttcctcctctgtagctccggaagccattcagaacgcagtggtcaattacgcccaggggaaagtggaaggggaagaggggctggtggtgggcgcgagcctgtcggcattcgaagtcgccggagccatcgctcgcgaaattcccggcatctacatcaaactctgccaggtcgcgtgcgtcgcggctggctcgccggctccggctccgggcgatttcacttcggaatacgtcatgagcgcattcggccaggctaccatttccgttggtaacgttcgggtgactttcgtatgactctgcctgcgtacaattcggacatccaacaagctctgaaatggctccataaccaggcgcctggaatcaccggcctgatccagagaaaggcgcaatggtatgacagattcagccgccaattctgggccaactgggagcgcgacgttttccacttgaaaactgccaacccgttcggccttatggtttggtgcatcatcctcggcacgccttcgaaagggttcggcctttatccaaaaaacagttcttgggcattcggtcggctacgccagaacttcatctatagcggtacacaagttccgccaccggcagacgcatcgcctggcggcaacttctacggtggcggcaatgccgaaattctcaacttggacgaaatcaggaaagtgcttcagctaagatatgtagcgctgatttctaacggctcgattgcatatgtcaatcgcatgcttcgttacatattcaatgatgatgagccatgggacgaggcgaccggtctgtacttctatctcatggactcaaccggcgagaatggccctgtggagaacttggcgatatatcggaaagattgggaaggtatggtgctgttgtccagttcgcccagaacgaaccatgtgctgacatcgacccctgccagcgacgccgattggccgggagtcgatccggccgcgagcggtattccggtaacggtcgaaacggcgtccgctacggccccggacggctccgctacggtgtgcaagcttactaagccggccgggagtactgcttacgtctccgcgccgatagatgggccgctggggtccggtagcactgtaacgttctcgttcttcgcgaaagccggctccacccgtttcattgcaattcagtcggctgccgatttccccagtcgagccgatgccgttttcgacctggattccgggaacgtgatcagcgatcagatgttggacagcagcgtggtaagcgcccgaatgattcgtctggaaaatggctggtggcgttgcgttctcacgaccaagaccgtcagctcttcgttccgcgctgcttacgtcgctccggcagaaaccaacttcagctggattgattcgaattccagcgcggcgattgacgtgcttatatggggcgctcagatcgaactgggtgatactccaactggatacttggagactaccggggcgcccgtaaccatcaccgattatgttttgcagaacgcccagaccggaacagtcaagttcacacagccccttccgaccggagtagaagcgtattggactggagactggaaaggcgggtctgcgaccgagccggccagattcgcagtaggggatgggactcaagatgcattcaatttgtccagccctgcatacatcggcctacccactagtggggcgttcaagctagaatacagagttggtccggcgcttaatttgtcgccgcaattgatcaacctcatgaatgaccgggcggtcggtatcatgccgacttgcgccggttgcgatgtaaaagtcattcaggagtaatgacgtgatcacacccgaactgatacccagtccgtttgctgcgcagggcgacaaagacccgattccgcagacctcttccactggttttgccaaccttcgcgacggctacacgccggactacgaaatcagtctggcgtcgaacaacccgcaggccaaagcggtcgagcggaaaattcaaaaccaactcttcttcatcgcgacccagaacgcacaggcgtggcagcgacaaatggcaccgccgtggtttcagggcatgcctggcggctacgaacagaatgcagaagtcgtgcgcgtcggaaatgacggcataatgcggcgttatcgttccatggtgaatgccaatgcgagcgaccctctcagcagcacgacttgggaagaacaacccgcatggtcggcgatgcgctccaacatcccgatgccggccggaggcccaggcctatcttctggcggagaagtcatcacgaccggccgcaacttcaacgacctgttaaatgggacgtgggagttcttctctgattcagtggttatcgcttctcagaatgcccccgtatatccggcttccgctggtgccgctgctggcatgttggaggcgaaatcttgggtgtccggagccaatacgttctgcgtccaacgctacactgatcgcgtcgggaacgtcgctgtgcgcgggcttaatgccggagcgtggaccaactggatgtatgcggtaaacgtcatggcccttcaacaaggtcgggtcacctatggagtcgcggccggatcggcgaacgcttacacgttgacgctagttccgcagctccaaggcggcctggtggatggcatgattcttcgggtcaagttcaataccatgaacaccggcgcctccaccatcaacgtctccggactcggcgccaaagccatcgtcggcgcggccaacttccctctcaccggcggcgaacttggccaaggactcatcgctgagcttgtattcgacgcagcaggcgaccgctggagaatcctcgcaggcgcgtcacgcatccaagttggcaacgccgatcaggactaccaggcgccgagttggaagcaagttaaagactatgtcgcgtcccaaaagctcaccgaagtggattggacggatgtcgtcaacaagccgaacgtcgctatccaagatacaacgccgtggttcgccaatctggagctgtccgatgctcggcctttcatcgatttccacttcaacagcaatcgcgccaaagattttgactatcggctgatatctgaagcagacggatcgctggctttctattcgcggcaggggtctgctgggcctacccaggacatcctgttcaaccgaaattccgtgactttcttccagccgcgactcgatgtggcgaaaaacctcgcgtacatcgcgaactctggccccctttggcagaacaccaccgccgatcagcccggttggaaattcacctttgcacaaggcgtggacgcgaacaacaacgcggtgatcgcagtcaataccaccaatccggacggttcctatcgttcacaggtcatgcgatgggactgggcgtccacgaacgtcatattcaacaaccgtccgctcttcgccggtcaatacaccccttgggattctgggaacttcgatccttccaccaagttgacggtgagcgccacgaaccaaatcgccggcccaacggggattcggaataccaacggcaacaccggcaacatgaacacctggggttccggctccacgacggcatcctatggcaatgctgccattcaaatcttcggaaaagggggcggtgagcctgccgcgatctatttcgacaactcccagaccggatggtatctgggcatggacaaggatggacagctcaagcgggccggctggtcgctcggcaataactcctatgtgatcaccgacgaatccaacatccgaacccatatcaacacaatggctgcgcgcccgatttgggggaatgtcgagttctggggtccgtggaacttcgatccgaatcttaaactcactttgaacgctttcaatgatagctcatacaccaggatgaccaacagcggcgcgaaagacgttggtatcgcgtccatgacgagttatgctgatgcggccatgtcattcttcaactatgaagcctcgaatccgaccgggccgcgcgcggccgttatttcgttcgtgagaaatggatcgcgtggagtgctattcggcttggattctgacaacaagctgaagtggggcggatattccctaggggccgtcgcgttcgagattgccgactccaacaacctcatgagcctgtggtcatcccacgctgccgcgccgaactggaacgggcagaccatctggaggtcgggaaacttcaacccagacaccaaggcgactttggcagctcgcaatacgacgtcatcccctacaatattcagttatggggcgtccggaatcgcatcaaccggacaggtcggtgcgttggttgtggaaaacaacagcgtcaccaataccgcagccgccatcacgttccattcgccgcagaaatatcaggtcaacttcggcctggatgcggacaacgtggtaaagatcggtggcggcacaatgggcggcgtagcatatcccatcatccactccggcaactacaacaactacatcaaccaggcgctggttcaggtgggtcttggcggagtcggttcctacgcgatccttgccgtgtacgatacttccgcaccggcatcgtccgttggacctggtaccatcttggacagttccaagctgttctattcgtcctgcgattcgacctatcgcagcaacgcccgtccgacgggcacctggcgctgcatggggtatgtgtataaccgagactccaccaacggcgactcggcatccctattccagcgggtaacgtaacatgaaatggacgcggatcagaaacccacgttggctggacgcggtaaacatccacgccatggttactttcgaggggatcggggaagttcctttcaccgccaatccgcacgacgtggaggcccacggaagggccatccacgctgcgatcctatccggggcgcacggacctatcgccccggtcgatgcgaagcgggagcaggccttgcaggacgctatacgggccagggaaaagcgggctatccttcgtgatacccgctggcccatagatcgtcacgacgagcagaggcggctgggtatcgaaaccacggacgggcctgggctgatagcagcccttgttcactggaggcagcagattcgcgattggaatagcggggatcggccgcgacttcccatggctctgaaaacgatgttcaaaaatcaggagtattgatgaaaatcacaaaggatattcttatcaccggaaccgggtgcaccacggatcgggcgatcaagtggctggatgacgtccaggcggccatggataaattccacatcgagtcgccgcgagccattgcggcctacctcgccaacatcggcgtcgagtccggtggactggtgagtctggtggagaatctcaactacagcgcccaaggattggccaacacatggccgcgccggtacgcagtagacccgcgagtccgcccatatgtcccgaatgctctggctaaacgcctggcccgtaacccggttgccatcgctaacaacgtgtacgcggatcgtatgggtaatggttgtgagcaggatggtgacggttggaagtatcgcgggcgcggcctgatccagctgaccgggaagtcgaactattcactgttcgccgaagactccggaatggacgttctggagaagccggagcttctggaaactccggccggcgcgtcgatgtcttcggcctggttcttctggcgcaatcgctgcatccccatggcggaatccaacaacttctccatggtcgtgaaaaccatcaacggcgccgcgccgaacgatgcgaaccatggccagctccggatcaaccgttatatgaagaccatcgccgcgatcaatcaaggctcctgatattcgcccaaaagaaaaggccgcttattcagcggcctttttgctttccggctttgcctcttcaaccatcttgacttcaaccggcgcggcggactcttcctgagtgaccgaatccacatagttccctagtgaactcagaacgccgattaacagcgctcttaccaccttgtccttgactgtctcgcctatgatcttggtcagaacggatattaactcttcccggagtctggggctgattcttggccgaaagcgcttgcgatgctctttgcgtttcatgtttagtcctctgtctgcggtcttctcctcaccccgataatggcttggggatgcgctgtgttaatcggaaggttcgggcgctattataactcgtcgaaaatgctcgcgcttaactgtttaacgatacgcaccgcgatattaaatcgccttctttctggccaaggaactctggcggccgggtccggtctaaggcctaatttgtcgacattaaaacgagaaaacccggatcgcctgtagggcaatgcgtccgggtttatttctatctagtgtacgctaggatcagtgacttccgccccacccgtccagccagcaatcgaagacggcgtgcctcggcttgtccttggcgccatgggagaagtgcttgaaccggatgacctggcccttgagatactccctgtcattccagcggcgctgtttctcgtcgtgggtcaggctggaggccgacacgttgaaagtgactccaggccacagacgttcgttgcggcagactaacgcaccgaccattccggacggcgacaggttttctgcgtggctggagcgggccgtgtggccaagttcattgatgaaagcttcattgttgttgtgcatcaactcttccacgtcgatgatctcagcttcatcgtagtcgtatcgcttgactttcacacagtgcccttccttggcagtcgagcgaccgaacttgtacagcccatcagcgcgcttgcccatggaaccttcgaatcccagcattgtgtggcggcgctcgacttcgctgaactgttcgatggaagtcaccagttcctgctcgaccaggtgaatcctctcatagccgaggcagtgacgaaggaagttcacgcgctcggccgccctggctaggcgatcttcggtcggtgcgcgaggatcggtgaaatcatcgaacacatggaaagaccagtccggctcaccgctgtggcggcgaagatcgccggacgacttctggaaaactttcgggtcgctgatgtcgccgcagaccagctcgccgtccaggccgttgaacagtttatcgctgaggtattcgtagatcgattgattgttctgccgcttgagttgacgagtcagcgcctcgccttcgaatacgaagcagcgaaatccatcgatcttcggcgagaaatacatcggcagttggccttccagcagcttcgggtcaaaattcgatgcgagcatgggtttcatacagttctccagaaaagaagcccggcgaaccgggctaaatggcggtaagccggctcagatggtttcgttggcgtggttcagttcggccatgatcgacgcatagcgctcgtccgactccttgatgaaaacgccgtcgtacatgacgcctttgcgatccttgatggtgtcgtaggctgcagcgtagcagtcgagcatggtggtgtcgtgctcttccgtcaagtcgaacagagtcatggcggccgataccaggctcttgatggccaacccatgatttccacgtgccagagcgcctgccagatcgccgaggcgctgcaaatcgtcgccgtaggtgggatgtacttcgccgctctcgatgaagaccgatagatgatcgaacagattttcaccgagttgcgcggccatgatcgtggcaaccaccattacgtcgccgatgccgtctttcacctcgactggtttgttataaacccaggcttcgcaaacttctgcgaactcttcgaccaacttcaggaattgatacttggccgaagagcctttgatcaggttccggtcggaaccccatttaacaaccaggtcgtgaagttcgcgactcatgatttgttcgatattcattctttcgattccttttggatttgggattttactgcgttgattatggacgccgtgctctggcgcgatccatccttggtggtgccgaagtagaaggccattaccgacttcagctcggcgaaccaatagccgatgatggtgccgatggcgaccgaggatgttgggtccatcagagcctcgcggccgaatgtgaagattgcgatgatgatgagaatggagcctgtcagaagagcgaatgtaatcgccgggcgaacgaaatcgttctgctgcgccgcaagcctcctcgcagaatccctgtcggccgcctctgcggcgaactggctaagctcggcctggagctggttctgctcagactgaaggcggttttgttcggcttgaatcgcaagctcctggagacgaacgcgctcggcgctctggagttcggcgaggcgcgctagagcttccggattcgcgtctagagcgctcgcgacagaggctgggtcggccttcgaccccagcgccgtcgcgacgatagcgcccacggcggcgcctgcaggcccacccaggagcgacccaagagccggggcagccgcgccgatcttactacctatgtccttccagtccattttcgactcctcagaagaaaggcgccattacagcgcctttctccggccggtgatttttagaactcttcggcttcggtcgcatcgccgacgccaccggcgtcactgcgaggctgttcctgcttgctgtaatccaccttcacctcgccgccgacgaacgacttgtacaggtcggccgcagccttgaagtgatccgggttcttcaccaggccttccagctcgaactggacgccggaccagctccccttgtcgttcgacatgcctacggtggtcatacggaccaggttggcgaaagtcggcggggtgcgcaggccctgcggggtctgaacctttttctgggacagcgcggtcatgagcttcttcgaggccttgatctgcgaagacgacagggagatcagagcctggccgaaatcgccggtgtccggatcgatgacgatgacgtaatgaccacgggtgtcggcgaagtagtcagacttcttgtcgctgaccgaaccgtcttcgttcggcgcgtacaggcgtccttcgacttccttcaccttggtcgggtctttcatcatttccttgaagtcttcgacgctgatggcgcccttgaaaccgccctcggcctcgcgaccggcccagcggatgaactcgcggcggtacgcggccggaatgatcagcaggccggtcttgccgtcgtaaaccttgccggtgacggtgttcaggaacatgccggccttcgcgccttcgatgtacttcgggtcatcttcatcgacctggggagacatcttctgcaaaacctggatgaaggggatggcataggactcggcatcggcgccttcgaagcctgcgccgtcatacgatcccaaatccatgaagtcgggaacttcggtagtcgcgacggcgccgccggtggcaactgctacggccttggtttcttcggttgcttcggaagtttcggttttcttaccagccatgttaggctccttgtttgtcgaatttcagttatcgctaactgtgggtttataataacggaagttgcaactaagtaaagcaaattacatatcaagatttgctctttttcaccttcggtttcgtgatcttggcctctttgtattcgtgtacgccgatgaaatctggcagctcttcgcccttctccaggtactcgcgaccgaacgcctggagggtctggtaatggacatcgcggttgatggtggcgtcatagccggcttcgatgatggcctcggccgccttcttcgcatcttccatttcgccgcgaccgaattcggccagaacctttgtcttgatgatgccatcgttgtcggtatcttccagccacttccagaacttcggtttgttctcttccttgacggaaatgatggccttcggctctacttttaccgtgcgaccgtccgccagagtagtggtcttctgaccaagctcctccaacagctccggaatggtgttgcgcttgagggttttcagctcctcttccttttcggccagcgccttttgaagatcgaggatttcgacgtccagctgcgaagccttgtccaccaggttcagcagtcgatggccgatgtcggtggcttcgaccgccatttcatccatgacgccaaaatagtcgatttcgcccggtgcgttctctttcaggtattccgggatttcaagctcttgctctttcatgtccgcctccaacttagtgatgttcccttacttgaactaagtattgagtagatattatgccgcatcttccttgatacggctactgatttacatattaaatttcgtcgcgagtgctaacgtcagcctcaaacactccatcaacgacataacttgccaggttgcgcttccactccaagctgacctggattttctcgtcgatggaatccagacagatcaggtcgaagtacaaaaccgagttgacggtgccgattcggtgatttcggtcttcggactgcatccgcaactcgttgtcttcgtcggtcgtgtagtaaatggccacgtctgcggcggtgagcgtgatcccgatccctgctgcggccgggttgcccaggaacacctggacgcgcttggcctggaaatcgtcgatcaatttttcccgctcggcctctttggtctcgccgtagtatgtgccaaacgaaattccttgggcctccagatacgccttgatctggtcgatttcctgaatgcgcatggcccagatgatgatggagcgctccgggtcttcctccagcagaccctccagaagatcagtaaacacggcgaatcgcgggttgtcttcgggcggcaggatcaccggctcgccatagacgttgatatagccggatgcaacttgcttgagcttcgaacgcgctgccgcagcatcgaaagatacgtccagcatgaagtcttcgttcttgagaacgaagtggtagtcttcttccacgcgctggtaaacttttcgttgctccggcgacatttcgaagtatatgcgcttgtacaccttgtccggcaggaatgggagtgcttccttcttcgtgacccggaaactgtgcggctcgatcagggaccgcagcttgtccaggttccggaataccgggcgcccacgctcgtctttttcgaccagttgcggcggcatggtttgcttcccttccagcttgcgcatgatagcgatcattcgaggatcgtcactgggaaccaaaacggaaaattcggccacgaacgcccgataggatttagtccccagaattccattccgcaagaattggaactgcatgaacaaatcggtcggtgcccgcgtcagaggagttccggaaaggatgcgacgggccacggccttctcacccagctttacgatctttttcgcacgcttggcttgtgggtttttgatcctcgttgactcgtccacaattgcgcaaactttgaatgtatcaaggaatcgctcgacctcatcatagccagcctggtggttgattgcgtcaacgtttatggcgaagacgcgaagaactttttcatctgcgaacgtctcggcatacagacgatccaagcgcgctctggcctttttggaagtcggtcggccgcgccaatccacgctcaaagtcttgatcgcgacgtgggtgggaatctcgcgcagaatccagttggtgtggacgcctttgggggcgacgatgagcagcgcgtccacgcgcccctgtaggaagaggcgaacggcatcggccaaagtcgtccaagtcttcccggtgccctgctccatcaggtatgcgaaattccgtttgttcagggacgcggccagggcattgaactggtgctgcatggcctcggtcttcatgcccttgacgggatatgttttggctttcatttgttctccaaatcggcgaggaactgaacaatgttatccagtccttctgcatagctcgcaacttccaccaagtcgcggctgttaagctcgaacaaatcgagcatgggattcagcagcagccaatcggtcccgatcttggccaggacgaagccacggccgccccagccgatccgttcccgaaggaaagggatttgcccaggctcgaaacatctggccattgggcaggtggaggcgcgtttcggccactcctccaacgccttgaactcgacccagaactggacacctcgacgattcaggcaaatcgaatcggacataccagaccgccgcgtctccagaaagtcgatcaggattcggccgagtgagcgttgcttaaacgcattcgccgctttcgtttcgcgatcattcatcgccttcgccctctttggaaactttctctgcttgcgctgccagctttgctttttcgcgttcggtcaaaatcctcttgacggccttcacgatgaacatatcgattccgctgagcttccagcctttgatgaggaaccaagagcctgtcggcgttccttcagcaatctgctttccgtattgcagatatttttcaggcctaattctgaaacgtatcggctgatcaaccgagtcgtcaacacacatgatgtcgagaaactgcgactggcccttgtacaccgggtttttcccttgatctgccctcttcttctggcgaatcggttcgttctcatcagacagaacttttttcaccatcttgacaatgaccaggccatcgtctccatcgcggatatcccgaatgttctggatggggtttccggaagttactccaaccagctccggattgtcataagcatgaccccagagcgtgtgagcttcgttcaaatctgcgaattgaacttcagaattcgacaaactcgcggcgactttttcccagtcctgaagcgtcttcagatggggaccggccagctctttatattgagctttcagctccttaagatcggcctttaactccttcagatcggccttcaacagtttctccagctctttgtctcggctgattttagccgaaagaatctgggattccagcgatgctacatcagcagccttgtcctcaacatcctgtgccgatatcgggcaattggccagggcgatcctcgcggccttgacttcatcgcgaaggcgcaggaacctctcggctttcgccgggccgaagcctttggcgttcatgatgccaccgatcaggcgcccgtccgccactacccagttaagttcggaatgctccgggtccagggccgtatattctacgccttccttggccaattcgcgaaggatagacacagtttgctggtcgtctttcgccgcccgaaggcacgcggccgcgtattccaggcgatgatatcgcttcatgtagcaggtccagtacgtcaccacagcgtagctgaccgagtgggagcggttgaatccccaggcgccgaatgtcaccatttcctgccacacacggtgagcatcgtccggggcgacgcctatggtcttggcaccctcgatgaacaattcccggcgcttgttgaagaactcttcaccctttcgcgcagacatggctttccggattgccgacgtttgttcccagtcgaactgtccgatgtcctttacgatggacatgatctgttcctgatataggaagacgccgtacgtccctgacagatattgctcgacctgcggaatggtataggtcacaggctcgcggccggccacgcgctcgatatacttggtggccataccagaagacaacggacccggacgggcgagcgccgtgatgtggtcgatgttttcgaacgcggtgatgttgatcgcgtttgccaccgagcgaacggcctgcccttcgaactggaagatgccggacattttgtcttcattgagaacatccagaaccgccttgtcgttcaaaggcaagtcgtacaactcttgcgcggtcacgcagttcgcgtcctggatgactcccagagttcgaagtccaagcgcgtcaattttgaggagattcagatattccgaatctggcttgtcgagctgcgcaacgccttcggaagtcaccgtacagaagtcgatgacttcatcgttgcagaccaggatgcctgctgcgtgtacgccagagtgggatgggtgaatttcgaggtcgcccatgcaggcggacgcgatctcatacttttcgcggaagtcgcggccgggctgagttttctcgaaagtgtcctccaatccttttccatatcgttcgtccgccgatgtatattcgatgatcgagtttttgatgttgtcggtatcatggaaggggatgccgaagcgctttccgacgtgagcgataaccgacgcggccttgagcgtattgatgttgcccaacttcaccacgttccaagtgccatacttctgctggagatattcgaacactagatagcgatgggtatcggcgaagtcgatatctatatcgggaagatcggaccgggaaatgtcgataaagcgctggaagagaaggcgatgagggagcgggtcaacctcggtaatgccaaggagatagcagaccaaagagccggccgaagagccgcgagctgggcctaccagcatatgcttcttggcgaacgcgaccagatctgccacgaccaggaagtagctgtcgaaatctttcagctgaatctgcttgatctcttcttggaatcgatcctcatactcctgggtccattccttgatgtggccgcgactgaggcggtaggcttgcccctcgcgagccagagcgacgatatcaccatccaagtggatcatcggcgccttcgccagtttcacatccgccaaccgctcgactaccgcacgagtattggcggcggcggtatcgaactcttcgcgagtcatgatgtggcgtaaacggctccacagctcctcttcggtggcgatgtggcgaaggccgaccgattcccgcaccttccaggccgacgcgaaatcagcatggtcgatggacggcatgtcgttgtaagaggtaattaccaccggctttccgaatgccctggccgtctccatagcgccgtgcgcggcgaccatcgacgcgggattgatgtcaatgtagtcgattccggccagatccagatgggcataggcctcgccagcgaatttgattacgccgtcagcttcctggaattcttgcggagtcaatccttgattctggaccgacttggaagtcaagcggtagaacttcttggtgtccttggcgagcacccaggctttgagcttcagctctttctcgccatcgtcggcgcatttgatcgggatttccatgccgaatccgcgaggcagttctgccttggtagcggcttgttcccaacggacgtggccccatgttccatcatcgacgatggcgacgaatggggattcgatctctttggcgcgctcgatgatctccgggaatcgaccatatgcggcgccgtaggagtaaccagagcgaacgcggagctgagggaaagacatcatgcggcctccattgcttgatacgcccgatacactcccatgcgcttgcagacttcgtggagcagccgcacgtcgtcgagcgcccggtgtttctgtacatatgggccgcagtagtgctcataaagatgttgcagccgcatgcggtggccgaacaacggcgccgactcttccacagtacagatatcgagcgatgggaaattgacttcgtccaggccgaacttgccgcgagccagatcgcaggtcagcatgaacttatcgaatggcaggttgtgggcaatattcgcgtcggctctggaaaagaagtcgcgaactttctggcgctgatcgaggaaagatgggtgcttgatcaggtcttcgttcttcaacccggtgatcttggtgatgatttcctcgataacgattccaggattgcagatgaactctacttcatccaaaatcttttcgccatcagttatcacgccggcgaattcgatgattctcggctgctttctcagactcaccctttggtggaacgggagtcctgtggtctcagtatcccatacagcgaatatcatgtttgttccctcttatgtcgaaaggccggctgctttcgcgaccggcctgaggagtatatcgcgacggctgaagatttacgccttctgtccgtctttcggcgtgatgcggctggagcgcatggtggcgtgaacaaacgccgaatagttgatcaagtccaaggccgaatcggcatccttgaacccgctattcgccaggcgagtgagtttgcccaccatatgcatcacgaacagggcgagccgatggtcatctgcggtcttcgccaccaggccgttcgggaagaggatttccatgatctttccgtacatcaggtcattacgaccataggtgctctggcgggcgcggaagacttcttctgcggcgtacagattgttgagaacatcttccgcgaaatcatcggaatgagcgtcatcttcgccaggccagacggatgccatggcgaacggcgcggcgtcttcggtcgggtcttcggactgagccgtttcagcgagcggagacggggctttcgcaaacgcctcgtcgagggtaggggcggagttcgggacggccgggaacggctcgcctgccatgtcgttgggcgcgctatcggggtcgctatcggccgcgacggcgaagaacggcgcatcgcaaccttccaggttcaggatgtaggagtcgatccccaggctattgtaggcatcgatgatgtcctggcgatcatcgaacgccgcgacgatcttggtgacgccttcgattttcttcaggatatcgagcacaactgcccgcttgaactgaggcgccggctcggtgttaccatacggtcgcatgatgagttcatactcgcgatgttcggcgatgccgagttcgcggtggagcttggccctggtctggaaaaagtggttgtcggttcggccggtgacgaagaaaatcatgaggtcggcgtcgatggcattcctgatgcgacctacagcgtgcgggttgagagtgtccttgtcgagacgagaatgatactcgtcccattgccgttccaaggcgaagctcttgcggtggctatcatcgaatacgcagccgtccaggtcgaagatgatgatgccattctttggtttgcgttccatattcagatttccttactggttgctttctgggtgacggttttatcgatgaacgtcccatcagaagtgaggcggaaaacttcgccattctggatgaaatcgaacgattgcacgttcatcgtgatgcgaatggattcgctgccgttggtcacttcgacttgtgcgatgtcgccaactttctcgacaatgatcttcatgttacatggacttcccattgacggccacagggttggcctcttgtttttccgatccccagaaatcgcggcgcagttcttcctgctcggccgagcgatccatccaggggcgatagaacttgcactggtagataggttccaacggaacatcaaccacaggaatctggccgggcttcgtctccagagctgccatgaaccggtcataggatttctgctggatttcctcttcattcatcaccttcgacccatagcgcgggaaggcgcaggagccggtggcgacgcagtgcggctggagtaggctgtcgaacatcggatagacttccagaaccagccggcgcatctcgcggaacacttcctggtattcgccctgggtccgaacgcacaggcgaaccttcgccatgtcgctgagagtccgcagattgaacttggccgcgatcttcgtttccatgttggaagggatgacggcacgagcgtcctggagcgacgcgccggcctccagaagcttctggtagctggtttgcgcgtcggcaatggcgtcatgccacaggcggttcagctcttcgcggacgtggtaggtcgggtcatgctcgccattgaccgtagccggttcgtcgaattcccagcggaaggcttccggctgaacgacggcgctgatttccagagcgcgactggtttcctgctggtaagccccggtacgagtccgaacgagttgatgggtgaagttcttgctgacaccctcgatctggaaaatgaagtccacgaactcgaacggcgagcggatggtgtccagcatgtacttccagtggtcgagcttttcggcctcggtcatggtcgccgggtcttggccgcgcatgcgggtggacttcgttcccaagagcaattcccaggcgttctgggtgtaactgatcagagaaattttcatcagaaatcttccggaattggcgtgaagtggaattttttggttagagccagggccaggccttgggcttgctctttacgaaggccatactgctctatctcttccttgagcagttcgcaggcatccagacgcgactcatactcttcagcctcctgaacggatgagaaaacggttccatcagaggttcggtacacaagttcaatcgacatgatgacctcagtagcagcggatgatttcggcgcggatatctcgacggtcgaggtagtgctcacgaatcttatcgcgggcgcgctcggcctcttctcgactgccgaacgacaggttgaacgaagtgaaaggcttatcgtccagttcagcgccggtttgatacaggatgcctaccagaacgaaagacggcgcggtcttcggctgctggtcggcttgcatttcgagttcgaggaaggacataggaacctcttcaggatgatctggtgcgtaaattaatagcgctcctgctgagcagctacggtttccggctcgtagatgagcatgtcaacgatttccgggcactggcctttcacccagtcgatggccgcgaccagtgtggtggaagcggagaaagagaaagtgcggtaagactcatggatgtacggcgaccccatcgaatcgcgctcggtcgtgcgagaaatgactgctttgatattaacgatccggcccatcttcggcctccactttagcgattatatctgacaggctcagcttctcgccattcaggaaataactggcgcgaaacttcctgtcaccctctggcccgacgatccgggccgttatggtgagactcccgccgccaagggcatcggtgtccctgaagaaagccagcagcgcccgcttgagcgctgcctcgcgaggatcgacggccattaacctaccacgttccagccgtgctgagcgcaccaaaccgcaccggcccctgcaggaaggctattcagaaggaacacaggagtcaggcggccatcctcggtcatatggatgaagtagcgggcgccttcaccgagccattcggccttggcgatagcgcgttcgagattggccttggtggcataggtcttggtgtggttcttgtcggtggagaaggttacttcgcgggccatttgtcgattccttttggttgaagggtttcgcgtttcgatgagggaatattacgcccacctgatccagaagtaaagcacttttgtaaattacttcacgaacatcttcttggccttctgataagacgaagaagtcatcaggcgctcgatgacgtccatgtccgaaaccagatcatccagaaggacattgcgccaggtagcgaaccggccgagcgagaagatgccagcctcatgggtgagattccagatcatggattcgcgctcgtcgcgaccgagcggaatgattttgcctttggtctggatggtcggctcgccatcttcgatgagctgtttccttctgatgccgaaggccgcgcagacttcatccagatcccaggccggattccattcgatctttttgatctcaccatctgcattctccacgacaccattcgcgatggattccacgatcaaggtatcgccggtgatggacgcacgaaatgttccgaaatcgggactggggaaatacacggtctggaagacgtcacaagggatggaaagcttgtatcgactcacgatgatggaagtgcctttaccgaaggacgggtcgattcccaggtccagtcctgccgcagccaggttggcgcggaatggcgcggtgctgatgacattcacatggtcatcttgccggcgaatatactggaagaaagaggcatcgaaaggacggctccaggtgatacggttcgcgagcttagccaccagctgctcatagtagtcggccggtgcgatccaacgcttttcagtcgccagattccagatggaccggtccgacaggcctcctgttactttccgggagtacaggttgcagtagtcgatgcgcggctgggaaatcagctcgtcatccatgtagatggccttgtgtacagtgacttcgcggaacgggatgccggtgagttggccaattactggcgagcggaatcgcaagagtgcgttgtgacgctccttgttctccggcgttgccgcgtcgatgatttgagcttgaggaaagcgatgcgcggcgatcagtccggctagcccggcgcctacgatgatgactttctgatcaggaatcatgatatgttccttatgagtgtacaaaacttgagaggataaaaaagggacccattttcatgagtcccttgaagagctagacgattcggtctcagaagagcggcggcttactcttcttcaccatcggaaccgtcggcgccctgaccttcaccgtcgtgctcctggccttcatcggccttctcgtcatcgccctggccagcttcgtcttccttcgaagcgatggcaaccagatcgacccagcccatgatttccagcttgctcagatagctgcgaaccgaggtgccgtacagcaggtgggccaccttctcgccgaaggattcgatttcgaccggctcaccaacggtgcagtgctcgttgatgtaagcaaacaccttgccgcgagtcgagaaggcctgcggggttccatggccgtcgccggtcgggatgaagtgagtggcgcgggggcgacgcgagccgttggacttcaggtcttcgcggcgggcttcggccttcgcgcggcgctcttcctgctcttccttgcggcgctgcttctcggcttcgcgctctgccttcttctgctcggccaggcgcttgcgctcttcttcgcgtgcggctttctgggcttcctgcgcggccttcttctcttcggccttcttggcgcgctcggcttccttctcggccttcttctgctcgcgctcggcttccttcgccttcgccttctcggccagctcggcttccttcgccttcgccttttcagcacgctcggcttccttggcggcggccttttccttcgccttctcggcgcgctcggcttccttcttctcgcgctcggcctggcgcttcgcttctcgctcggctttcttctgctcggcttccttggccttggcttcggccttctcggcgcgctcgcgctctttacgttgacgctcggcggccttctcggctttgcgcagggctgctgcttgttccttggtcagctcttcgccttgggcctgttcgttctggtctttctgttccatgttcttactccgggaatgtttaaaaggatggcttattggcctgtgaggggattatctctaaactaattgaagaagggaatacccttagcctgaactttcctaaatattttctttcgggaaagtccagactctagggaacttatttatgttcgagaagttcctagcttttacgcaaaaacagcaagtattcaattgcgcgagttatcccagtatacatcaactgactgtaaggaatggacggcaagttttcttccagcattgccacacgcttccattccgatccctgcgacttatggaacgtcatcgcccaaccgaagtcgaatccgccaatagccttctgcgcctccagccgcacgtcttcctcgaccgaaaaactcagagggttgaacttcacccagcgttcacagttcgtgccgataatgcgaactttggcgaacaacatttcatcaggctcgtcgtcatcttcttgcccttcaggaactggcttgaagtccagcagaatggcttgttcgccgttcatgattccatattcgtgctggttcccagtgcacaccagcttctcaccgattcctggctgcacgcctttgtagccgaggattcggcgagcgcgtgcgttcaagcgacggcgagtattgttgtaagcgcaaagaatcacaccatcgttgtccaggaacgtccgcatttcatcatccgacatatcgaagccggcccggaccactatgtcatcatactcgcggcagggcaggcgctttccctggcggacgaacatcgacgcccgaacgatattgccggcgttgcgctcgatttcggtcatgatggtgtcacagctgttctcatggaaaatctggacgccgcgcacaggaggaacttggccaaagtcaccaatctccagaaccggaatccggtgcgacagcaagcgctcttcatcccactcgccgatcatggacgactcgtcgagcacgaccaacttcggcttctcgtcgagcgagtctttgttggcaaacattatttcgccgtcttcatcttcaccaatcggccgatagatgaagctgtggagggtccgggcattggtgcaacccttctcgcgaagccgcgctgctgctttcccggttggcgcgacgaagactgtccagtccatcgagcagcaaagttcggcgattatcttcgcgatggaagtcttaccagttccggcgaaaccagcgagtcgatagacctggcggcggtgcgctcgatcacaccaaccgcgataccagtccacaacggaattgatcgcgtcgatctgctgactgtttggtcgaaagccgaatcgctcttcgatctgatcgacggtgaagttagatgctgacatatttgcgttctccaacgctaggtttaatggaatcgagactcagtttaagcacgccgtccacagaccatccagtatcacgacgatacttgcggccttgcggatcgacatagaagttcttcgtgcgccgcagcagaacataatgccaagcagctccaagcgcgtggacccttcctttatacgggaaagccttcgcctgctctgcggcctctttggccccagggagccagcggacggtcgaaaggaccaggaccgcccccttaatagcctgggaagcggcgcggccgtcctgtgggctatagcgatgtctatcgaagtctacccagtggtggttgccgcgccggagcttgaccgttcgggatcgcccctcgaacaccaccgtgccttcatgagtaaaaatatgttccgccatctaatgttcctttataacgtacagttatgctttacctctgcgcaggaagagtatactatcagctgactcgccaaagcgagcgaatttaatccaactttacttcggcaggaaagtggccgatactagcgccgccgcctgtactgccctccaaaacagaggatacattaaatgcaagaatgcaagatttcccgcgaccaactcccggtcggtaatccgaatcccaatgtcgacaagacccgcgacccgaacctgaagcccggtttcctgcgccgcagccgcgagctggacccggcgctggcagttcgcattcgtcgcgagctgatccacgccgaagcatccgacttggccaaggccggatgggtcaattcaaagtccagcctctatggatcgaaagccttcccgcgccattccgtcgttcgcgtgacaggagttccggaagatggggctttcatcggcatgctgatcggcttcatcgagcatcgcgagcatggcgaatgggcggtcatggaagccggaacgaaagaaggcggcgccgtcatcattccagtcgatcacatcatgcgagcgtcattcgccgaagccgaagagttcgccgaaaagtgggagcggaacttggggtggcgtctcctgcgccaactccgcgagtgcggcgccctggccgggactgaagacgagttcctgcggcggatcatcaatcgatacgttcgtgatcgcacgatcctcgatcaccacaaagtcggcgcggacaaaacctatactgatgcagtactcaaaagcatcggcgaaacatggccgaagattccttcggggaaattcgtcggacacagagtcgcgcagctcctgatcggccacaagctaggtcgagcggggaccatcctgaatgacctggtggacttcctggagaagttcgcggccgggcgcgataaaattctcaacatcgccatctgtaattgaggtgaatgaaatggttgacttggaaaagctgagtccaaagctgagtcctcggcagcatgccgttctactggagatgtacaggcatcctgagcatccagttcacagatcgccaacgaatttaactcttaaggctttgagacgaagggggcttgtcgagctatcctggaaggattccgtggctggatatatgttcggtcgccaaccttgctggaaaataactgatgccggcataaggcgaatcctgggagtgctgggggaataatatggaaaaagaacaaagcgaagatcacccaagcatccctgagtttgagaagaccgacgccaacaaactctatgatgctctggagacgatttcactgctggagaagaagttggacgaatccgaaaagcgcgggagcgagctggccgcgagctattgtgacggcgtagtcggcgatgaatacggccatccttattgtcgttataaagtggaacgcgacgccgccttggccgaagtcgagcgcctgcgagaatcaaaaggcgatccctctggcagcttcgacagatgtatgaagatgatgtacgagcgcgacgagaatgcaaaacaactcgacgccgccttggccagggtcgcggagctggaagggaagttgacggactgggtgcacgaagggttccggctcaacgaggcgctagcggtcgccaaggctcaacccagcgtgccggaaatatctggcatcggtcgcgatgccgaacatcccagagctgtagtgctgtatctgcgtaacgaacccagcgatgaagatatgcgagcaattcagaactttttgcgcgccatggccgcccccgctcagcacagcgtgccgaaagcatggctcgacgttcaggcagagcgccgccggcaggtcgaggcccaggcgctaaggcaggaagtcgcagcactgcgcgcaagggcggatgttgtgccggaggtgttcgggcttgagcggtaccgcgtagaaaaaactgggaagggtttctggccatactgcgtgcgtgcgggggatggaacgcgtgaactgttcgtcggccacttgaagcagtgtcagcgggtagcgaccgaattggctacggcgtttgaagatgggaagtttatcgccgcgcccggcagctcggctcagcacagcatgccggaggggtggaagctcgtaccgatggacccgacatcgcagatgacctatgtcggtcagtccctgcgttatgacgcggtaaacagcatcggcgagatttaccggcaaatgctcgccgtagctccctcacccatcgatccggccgcgcatcctcagccgtgccagcaaccacagtcccatcctgcccgctgcgggtgcgagcggtaagtgccaagtaaggaattcatgtaatggaaccgaagaaaccttcaccagtagatggagtcatcatgaccagcctcgacgttctcaggaaggcaaagcctgaagcccaggacgagtatgccctgtccatgttcgcaacggcgatccgccagaaactgcagcgctcccgcgataaaggtcgaggcggctggatcgactgcgacgaagatgttctgatcaacggattcgccgaacatgcgctgaagggcaatgagaacaacctcctggacctggcgacgttcctgatgttcatgtgggtgcgcggcatcgatgatgcgaagattcccccggcgctcgaaaaggcgcggcagcacaagatcatggaagcctggagccgggtccacgaagatggcctaaactccgccagaaaggcgagtgctgcgcgacagtttgtggaagtgcctcgacgcaaggggcgcccggagcgacttgcatgaagcctcacgaaataagactggcacaggccgaagagttcctgcgcgaactcggccgagggattccggacgacgaacgggtaatggtcggctacgctgaagaggccaccgtccagaccgacgagaacggccgcaagctcaacgccggctggtggcctgtgccctggaaggaaggtaagtacatcaattccaggtccaacgcctatgcctgtatctcgtcgtccatcaagacgcctaacccgaagaccggccagatgcgatactggcgcggcgaagcctctttcggccacggcctggcgttgatggtcgatgacatcggctccggcaaagggtccaaaggcgacttcgaccgcgacgagttccgcgagcgactagagccgaccgcgattgtggagacttcgccgaacaactaccagttctggtatttcttcaaagagccgatgtcccacatgctccagttcaaggcgctgctctattcgttcgtggaccaggtgctaaagaaaggcggcgacaacacagtcaaggatgtcagccgttatggtcgcatgccattcggcttcaacaacaagcgcgggaaagacggcaacttcaagtatgccgacgaaaacggcaaacccgaactggtgcgcctgtacagcgccgactattccaagcgatactcaccggaagagatcgcccaggccttcggagtccgcatcattatgccacagatgaagaaggtggagataaatcgcgacgattgggtttatgaccaagtatggctgaagtatgccgagcacatctgcacgaagtacaagatgggcgaagcggcaggcggccaggtccagcagaatatgtccggcaaataccgcatccgctgtccatggggcgacgagcacaccaacggcgatcctttcggagcgtactttcgcggaccgatacctggcgccgagcacgaatatgtgttcggttgcgggcacgatacttgccgcaaagagcatcgccggacttgggcggccttcacggatgaagtcgtgctaccctatatcgtcgaacaattggaaagaatcaaccgccgtcatatcggtgaggagtagacaatatgcaaaacgatcctggaatcctgattaccgccatcggcttgctgttcctcggccttatcatcttcttcgaaggcctaaaggggtggaaaatacaagtcgcaaacttcctcgcgtcgcttctgtgcttcttcttcggcctttctgctttgacgttctggttcgtcgttgcgtttgatgtattttaatcgacgaacggtacagaaattttcggatggggacggaacttattagctatgccggtttaggtaggagataatagccgtccctttcgcctcaatgtgtagaggcaatgttgaatccgatcatgtaaagcagaaggcggcaaacctaacatgattatcgacgacgataacattcttgatgatgacgaatcggggtccagtgagttcgatctcacacagatagaagatgctggaatggaccctttgatgaccgccgcaagtaaagcggccgacgatgcgattgcgaggaatgagacttaccgagcgcaaaaggcagcaaagtatgcagaggcgtatgcggaaccagatttgaagaagcgagcgcgattgttgatgctcgatcaggcctttgatcttccggtcagccggctggtgaaaggaccgttcgacgacttcatcaccaagtacagctcgacttcagacagcaactacctcgcggtctatgatacgttgttctgtaagggcgacggaactgtcccacacccgcacttcgacgagtttcgcggccggctggtggaccaccgaggcgtggcgttcaacaacaaaaccctcgatccgattgacctgatgggcgccctcgcggctgcggccttggacgatccctcgattaagaagacgattgagacttgctgcgtttgggcgcgtcgatatcgccgcaactcgctgatcgagacgtttgagaagaagataccggattgggacggcgaagagcggatcgaaacgctgctgatcgacttgttcaaaccgttcgacaccgagcttaaccggatggtgagcaagtatttctggctgagcttgtactgccgcatcaactaccctggaatctcggcgccgatctcgttggcgttgattggtgggcaggatgcggggaaatcatatttcggcttgctgatctgtaaggaactgtccggtgggcgcgatctggctccagttcagctcgacctgagccgacacgaccagacgccgttcctgcgcaacatcaccggcaactcggttattgcgaacgtcggcgaaatgtccggcttcaaaaagggcgacatggaacgcatcaaagaattcctggtgcgatcttcggatacattcgatcagaaattcgagcctggcgaaacgatcaagcgacaatggatcaccatcatggacggcaacggatacgatggactccagcgggacgactccggcaaccgtcgattctatccgatgttcgtggcacaacttcccgacgaagatggaaagccgaactgggttaagccgggcgatggtaatgaaccgttcaaggtggacttcaccgacttcggtcgcaaattctggcaagcgatggctgaatgccgcgcatggatcgaagagcatggtgtcgatggatacctggatatggtgtcggaagcgaaccgcgaagtgcagaagttctctatttcggaaatggagaatgcgcgtggcgtggttcgtgatgacacgattgatatgtatctgatcaacgtgctgatcagttgcgagttcgaagagatcaagcctggcaggaattcaaagaatcctggatggagagtcaacaccatcgaaatcctgaaatggttcgatgttctcgccagaaagaagccgatttctcgccacttaactccgcacctgaaggctctgggatttgttccgaataagaatggcttgaatggatggtgcctgcctgtagataaggttgcacctggatggaccagagatatgcacacgacgttg

SEQ ID NO: 3 - DNA, 90869 bp, Unknown
  source: /note="Description of unknown: bacteriophage strain capable of infecting bacteria of the genus Pseudomonas"
tcgacggattgtagcagtccatcccatatctatcaagatatttgtacgagagcacgctgcgctccaagtgtagtacacttcagagaatttgttcattttagtccctccttgttttgatgtgctcagaatacacaaaggcccggaagctgtcaagccccgggccaatgattttacatgcacatttcacattcttctgttctggagatatctcccgctcctctcatactgtagatgtagtacaaagataggatgttcgggtcttccatggcgagacgatggatgtacgaaatgtaagccggcgagtcgttcgacgtgaagtacaggttgatgctctgaccttggtcgatgtacttctgccgctgagagcacagacgcaggtagtcttccattctcacctcaaaggcagtacggaacacagccttttcgtggtcagtcaaccagtctacgtgctgaacactccctttacgttcgttaatctgccttgcacactcttcccaatcgaggcctcgctcttggataatctccagcaacaccttgttgacacggaagaattcacctccagcgctctgcttggtgaagcacatagcaacgtccagtcctatgccctcagaagccccagccatgagttctgccgtcgatttagttggcggcatcatcattgtagtggcattacgcttccctagtccacggcagccctctggctcccctagaacctcagctagccaactgttacaagcttccgcttgctccttcatacccttgaagatggcgttgttcaggaacatagcatccatactaccgaccgggaatcgctcccgctgtagcagggtgtggaaccctagaacaccgctgccaagcgccctgaagtccttggtgaatcggtaaatcttctccagtgctcggcggtcctgaacgctgacctcatccatggttgctaggtattcgctgatgttgcaatcagacataacctgaccaataaacacaaggtgcttaggccaagaacggtaaagttcgaggttgtagttcaggataacgcagctaaaagtataccagtcatttgccgggagaacagtctcttgacaaaggttggacgcttcacagcgtagacccgcccgtttaaacggctctgcaaggtgccgattcatcttatcgataaacgtgaagtagccttttcctctggccagcttgacgaacatcattcgcttccatcgcttcaaggtctccgggtctttctcggccatatccttgcaccactggtcgtctagaagccatccgacgttgttcgactctgtgcgcttatacaggtgatcgataacgttccagaagtctccatggcgggggttgatgctgtatgcacagctaccacgcctagaaccctgtgctacctcttccatgacgttgataacgtcccgaatgacaggcatcacaccttgagactcaccgcctcggatagcgtctccttctgatggccagttggtcaggctaaagcttgtgccatggctgtgcttcgttagcactgcgatctctgtcattacattgtaacggtcatagaggttgttgtccatcagaccgccagcacaagataccgtagtgcccttcttgcggagcccaccgttcgacagaagcggagtggatgggcttacaaaaccgtcccacataacgtcgaagaatacctgttcccagtccttgcctctagtgtattcgtcctcctcccaccactcaggatacaccgtaggggcgtgctgagccatagcgcgagctacagcttggaagcgagagcgtacagactcgccctcgttcgaatacttcttcatgaacaactggtagccagccgtcgtataccatagaggagtctcgccggttgcttggctgttcttcctagcttcggaatagttgaacgtgtctctcttactcatatttcagctcctcttcccaagcctttgccaattcctcttcatcccaccctagttcgtattccatgcccatacccggagtgaagaagtcgatcatcttgtaggcataagtgttcatttcgaaccaatccttgatcggagtgtcatcgttttcgaagtgatcttctaggccgagtcttcggcaccagacattcaaacgataacgaacaaacgctttatagttttcagccgactccccattaagttctccgcccgggatcgccatatcgacaatacgacattcatgagcatatacatggtcgatagcttgtcgaatcttctcgacacgccgagtatcttcagacaatggtctcccaatctctgcgtagtattggttgatgatctcagccgaaactacaccgtgcaagtcttcatccacagcactctggttagccccgcgtgcgatgacagggatatcgttatacccgttgcactggaagctcttcaggatagcgaaagaactgaacagaagggcagtctctgttaggctgaagataattaccgaaagaacatcgtcttcatcgcctaggacagactcaagccaatccattcgacccataagctcggggtcatccttgtaagctacatagtcctcatctgtatccatccccagcactacgttgatctggttgtagaattcagcgtggactgccaattccatcatgcacaggatcgaagccgctagtttaacctctgggcgagggaacgttcggactactttacccatccaaaactcctcccctacgatcagttcgtatttgaggaacagttgaaggacagtctttacagcgtgaagctgatgaggttccaacttaaacttcaggttcaacttatccagctctaccttcatttcgctagagaaccacaacttctcttctagttgctggtttgctagttcgacaatgaccggatatttccgggcataggactccgttggagtcctgatttgtgtgatcttattgaaaatatcggcctcatctgcgagagcctttgtaacttccatatctactcctactgcattaattgtggaacgttgcctctgtcgatccctctggtcgcatcttacgaagagtgaaccgtagattactatcatcacacgctgcaatatgagcttccagagaggcgcaaccgaggctcagccactctttatctgtccgctcaaagccagagaatcgtagaccctctacgacccggccaatcagtgtgcgatgttgacagaaaaccatttcatacgagtagtttttaacatccatgccgttagtccacagatgctccctcactaccttctcattattactctggaatgcctctttgaagccatcgaccagcatgaggtcttccagactcaggttatattctgccattttaaactccttcctcttcttggccgtagtactcattacatacgtgccctttaattagttgacgatgttggatgaaacctcggaagttaccagaccagaggtcaccatattggtccaagtgcgtcacaccgtcttcccatccagtttgattgtccgagatgcggagcatcggtgttgcttggtgttcgaacgggctagcgtgaacgggcttagtatctaccaatcggttgtagattacaagagctttctccagagtctcgtcgttcttcctatagctaacctgagcacagcagctagcagataccttaatagcatcctctacgctcagttcttgcccgttacaatctgcgtaacgcagcttaccatcccctatgcggaaccgagtcacataaggaacatgccactctccgtcatatagagcctctgccgggcccgctttaataagagcctcatacattttctcagcgagaaccttgatctccggttgtgcgtctttatggcaacgcaggtagaagaagttatctagttccgtggctgtaacaacggtcttcatcatctggaatggctcaaggagacggttaaccacctgcttgtggagtcccattttatttagtgcgctagcgatccgagccgcactctttgcagccttcttccacaggtactgagagctacgctgcaaacactcactcagttcgaactcagcttgcatacccggttgattcattccccagtgaacaggcatcgcaggattctcttccacctgtcggatcatatgggcaacgggaatggcacgactacttgcagcatttcgactaaaaagtcggtgagtcataagttcactgtgaataaaccgaggatactccagttcgaatgtagtgatgaatctgtgattcttcgtacctaggccgatccgggaactgtgttgaatcacttttgcagaaatttgcataaactctccttattaaatctttgatacaataaagggagccgaagctcccttgttttactgaagcattgcgaaggtgaggcaccagacgatctcgctagcgaggataggatgcaccatcatgagcttctgttttactttctgtatcatatctacacacctccttcgtttcaacttggagcctattatcgcaagcctcggggagaatgtcaacccctttctctgagaatcttatcgatctccaactgagcgaagaagatgactttctcgtagtcccggataacatcgttaccggccttcagcttgcctaggttctgtgctgccgcagcccgccacaacgctttgaacatgttgccttgaccgaatcgcatatccagcgcttcgatgatatcgttgcactctgcaaaatacggcatgttagccttcgtagtggggttgttcaccttgacagtgtagtaactagaggagcctccgctacctacagcctccttgtggttagccatagcttccaatgtggcatagttttctttgcctaggtaatcttctaggttggcgaacacaaccttcttacccagtgcaacaagctcttcattgagtctgtcgacctcggctaaagcctcgtccctctcacttagttcgtcaacttctttgtgctctactgtctcgggattcccagacatagctgaaagttcctcatcgtcggcagtgtaaggcgacagaacatttttaagaacagccatgttgaatagtggcatccctttagggtcgccgccaatcagaaagtctccgtagtagcgctcactgtttgtcaaaggctgagcccgatcccagttaacaaaggtagtcgccggagggtcttcgaacagaacatcatacgcttgttcaacgtcgccgagactggctgggttataacctctctcccttaggaggaagaaatcagagaatctacataccttaacagagtgctcgtcatctgcaccactcgccagccttacgaccaactctcccttttggatatcgccccttttctcggtaacaaccaagactgtgccgtgagggatggtatcggcgtcccaatattgaatattgataggattctttgaccgttgcaccagagaaatcggttgcccagcatgaacgtcgatgatatcgttactcaaagttcacctccatatctttcaactcttgaaacccgtcaagactctcgatcttagcgcacatcactctcatagtgacatatcccttcagtacacccttcggacctttaaactgactctctaggaaggccagcagggcatctagccctgctgagtcaaccatgagatcgtcgccagataggtcttcttttacaatctcttcggccacttgttactcctcgtcgctaatcgattcacgaatgcagtccagaatgaaggacaggttcatgtgcagagtcaggagatcgtctttggtctccggcatcgcagcaaccaagatcatcagcttcaggaagtcagggccacccattaccagaggcagatcacccaagctggtgcggatgtgtcgtgcaagcatgccatagtccagttcaccgtcctcggtcactatggaatcttccagagatttacggtcggtcaaggctttctctaccagagcccgctgctccgggttcatacctgccattgcttcttccatttgctcaggggtgatgttgaaatcagtcattttatatctccttttcgattatttagatttacggtctttgaggtcgattttgaaaatagcgccactgttgcattgtacagtagcactctcgaagtggtcaactccgaaatgcttaactccctcattctgctcgcatgtcgagagcaccttctcaatagattccgaggttaccatcacgcccatgtacagaaagagcaaacctgcaagggccgccccaaggaaaaactcagccatatgccctcctattaaccaatcactttaacagagtcgaagccaagcaggcctgcatcctctagttcctcaatagtatcctcaatcccgcagtctgacaaggctttagctacatcctcttccatctggtagtagtctcgccacaggcattcattaataccgatatcccattcgcaccagaatttataaaccgtcatttgaaacctcctttctccatcatgaagtccagacttactggcataggtagaccaaaaccatctttcacttcgtgaatcatcacgcagccacggaagtgattgttgccttgatagcctttgtaagcctcgtcgtgaggatagcacgctccagtcacaatgccaagcctttgtttaccatcgattgtcggatggattgcccagtccagaagctgacgatgccccatgacaaacgaatgtcccgcagccttgagcatgttgttcgctgtaccacctagaggcttgccagtgaagtggttttgaaggtagtggacgtagtagatgccatccacttcaataggcttgaggaacgggacaacctcaaaaccgtagtcctgaatccctagctcatcgctacccacggtgccatacaactcagggttatcgttcgctgctcgatcagcccgctcttcgtggttgcccagtgtgaaaatcaaccgaggttggtacactttcttccgattagcccgttgacgttcctgtagctcccacagaggcttgaacagtcggtccagaccctcacgtccgacttgaacgtcttcagagtacctacggccctcagaggagcgtttacccttatcgtaggacgacaggctagctaggtcaaagtgatctccaatgtggatcacaacatccgggcgtttggctacgatgtatttaccgatagcttccatgtagtccagattgatacccggcttgcattgtgtgtcagaaattacaaagtgtttcttactgctcattctgcctcctcgcagtcttgtccgtacagaaatgctccaatgtcctcatacacagccgtatcatagcagtggacgttatcaaggagattataagctctttctaggagttttgtggcttcctctaggtcttgtttgaggaagtatgctctcgggtctgtcatgctcatttcgtctccttcagtagtttaatgatcgcgttatacgtgaattctctgactgtcaacagaacatatccgtgtcctgtgtgatccggtacttcaaatccgataacatctcttagcaagtcgagtaccaattgattctcatttttcagagattcagctatatcgataatctcgaaagccgattgattcttgaaagctgcggcctctcggctagccaaacgagagagaccattctctactatcatagggatgcttaggtcaggccagcgctccatatcctttctagcaacgtacgctccgtgtgcagtaccctcgtaggcgtttctccaagctagagccgcagccccttttgttgtccattgccgcttccctttaggagtagtccaaagctccttagttttcttgtggcggataacgtatgtagcaagactggtcatagctcctcccctgtacgaagacactctatcgctcccttagtagcggaaatgagtaccgagtatccctcttccaactgatcctttgcggtacagaagaagtctataactccggcgatgagcgctgttacaactggcagccagaagaacagagcaatccaaatcagaacgatagaagctcgtactctgatcggtagctttcgcatgattttaagaaacttctctctcacataggcctccacagttttgcaaatttaagaacattcggggtttcctccttgctaagaggaggcactactagacaggagccttctccgttgcagatggttctctcatacccctcgtatacaaacgggattttcttgatcttgttgtactctttttcagagactcgtacaactattttgcggaagctttcttccagccatgcgatccatttgcgggtgaacatatcttctgcctctacctgatcgtctagaggcggccatttaggcgctctatatctcttctgagcattacgatcagcccctaggatgctgtgggcgacaagagtcggcaccatgtactctggtgcgtcgtctctcactgcaatgtatacccgatcctcgttcatccaccctccttcttagacttaaggtattcaatgatctgttcttttctaagctttgcgttagatgcaggcttaattccagcttcctgcaagaagaccttatcataccccttctgcttctgtattgcaatagcctgtttcacgatatcagcctcttctagggtcagcccgtagcgctcggcgtatgtcttgatctcatggcacggtttgcacaagacagccaaatctcctatgcggacaaacaccacaccttccacgaacgcttggatatcctctactcgcttcagggagaactcccccgtcttgtggtcaatctcaacgttagcttgaggagtctccttcccgcactgctcgcacacatagccccacacagtagggtgcctaagcttgctcttttcactgggattggttatcctaatccttcgggatttagcaaactcaagcttgactgggttcttagaccagagatagcggcgaatgccgcctctgacccaattcaagaacgccgattctgtctcccagatgcccgggaagtcctcccaaggacgcgcccttacgctcattctgcacctcccaaatccactccaagtttagccaaaacagccctacagtctacccggtcccccgcccaacgttgcatgtgggcgcagtcacaatacatttgcatgatatcgattgcatctttagtgtgctctgtgtcgtcccatgctgtgtaagtgacaggctcaggataccacgatttgtaggtgtcgtagattgcttgccagcactccttgtccgttgtgcagggactgatgacgttgtatgccgccacttctccaaagtctttccctacgcacaggtcggcaggtctgtagcagtcaacagggtcgccgaacagcaactggaagtagaagaacttacgtccctcgcctctcaccttgcccttagagtccctgtagagcgatcctaggcctgaaatgaacttgacttgaacaggctcacgttcgtagttacaaagccatcctagagtgccgtctgcgtctttatcgatggtagccccgatcacgcgctgagtagtctcccctctggagtagcttacaccgttcttgtacatcatttcggccatcaagtcgtccgcttctccgggatggatgatggtgtcatacgcttcgatcatatactgccttagctgacctagctgaagaggcttaatctgccctgtacgcttacccttgtacctgccgccacgagtgaaggtctttttacccttggtaatctcgtactctttcgggaggggaatggaatcgcggaagttgtcaggaccggacaggagaatcttgaactgcttgcacccagcttggcggcagattcggtcgatcatggtcttaacaacagagataccgtaggacacgtgcttggggtcttgatggtcctcaatttcgaagttgtcttcgttgaatccctcttcgtctttgttattctcccgccaagtcgtccgattcttccaagtttcctcttctcctgtcaatttgtttctgacaatgatggagcgggtctcgttgacacttgcacacttaaaggcgataaggtcgccgtcgatgaggacgatatcctcttccttttcactcatttttatctccaatgaaaaagggagccgaagctccccttgggttagaactgtacaacctgaatgtcccactctgtttgtagagtgtcagggtttaccttgttaggaagagcaacataagccggctctcctttaatgatacactccgcagcgttcttcaaatctttgaagagatttcgctcccacaggtcaccgctgaactggttgtttactgtgggaccttttagaatgtactcaggtactcgaacaataaccaaactactcatcattagtcctcacttattccggaagtgctttttaaagctaaagttcagtttactacgatcaccgaatgcgtaaatcagacctacaattacaagaaacagtacgagaatcgacaatacaattacaagaggaatccagatgggcatgagtgccacagtccaagagatagcgagaactccggcagatttcagtacacacagaacgatagcagccagaaggaagatgggaccaaaattgatttgcatgtgttgcctcctttgaatttttgaaaagaaggggccgaagccccttgtcttaccaccgtcttttagaacggaatgtcatcatctacgttggtttgaaccggctccactttaggtgcagcttgggtctgcggcttatcttcagcttgctcttcgctgtcgccactggagcggttaccaccgcgtgcagcttcaacagcttcgatcatcgccttgatatcagaaccttcgtagttcttggctcgcttgatggtgttgatgacgttggcacgcagttgcttaactgcctcttcgtcgttctcaccatacaggttcacgccgtagatgtacttctcatccagttcagggaccggaacaccttcaggcaccataccgaccagactgatatcctcggtgaggaatttcatgtcgtttttgcccggcttcatccacactcgaacttggaactgagccactttacccagaagctcgcctacgcggtccttggtgaagagttcgtcttcgttgatgacgccagtagctacagccagtttgtgcagcatggagttcttagcgaacgcccatttgccgttcgggtgcttcacttccttgatggtaaacggacggccaacaatcttagtcttctgacccggcagagtaaagtcgccgttgtacaggacacgaagcggagacttgttgctgttaccggtcaggtataggctcttgtctacctcgatctgagggaagtccacagtgatcgcgatttgttgcatatcgcgctgcggccagcacttcagacgtacaggcttgcgagtctgcttgtccagtccatccttgaagtaagtgttcggatattccttgatgatttggatttcatcttcggcagtgccagtgaacacaacctctgcatcgttctgctcttgctcgccgagatcgatgataccggagatataacccgggatcgaacgcgccttagcggcagtgccggcagcttcaacgacatggttgttcagagcatcccaatcgacttccttgcgaatgccgccgttgccggattgagtgttggtagttacgttcagtttaaaagccattttatttctcctatttaagtaccctagactgggcgagtgtgtcagccacttgactgacgattataccggacattcccggattcttcaagaggagaagcgcgttaacgcacctcctctcctttgattacttttacaatcgagactccctcagccttgccaccccaccagcgcttggtggctcgcgcttcttcgcgagtgaggcagaatttaagaggactcccgtctgcatcgagaacagcataacccattacagcaggctttgcaaccttttctttcttctcttcgtcaaccggagcttcaaccttaacctctgcctcgtcctcttctttgaactcctccagcacaaactcgggatagagggtctggaactgcaactcgtcagaggtttcaccgccaatgtcaacgcgtcctttaaaagtcatgcagaacgggctctccccttcgtgcatgctcttcaaccagcacgactcgaagccttcgtacaaggctggttccgaagtaaccaagtagtgggaaatcaagtcagggcgtgcggcaacagccttaacataatacttcttgcccgggaccgctacaatttcgaagcggtcgttgtcagcgagcatcgactggtaatctccaagtccattattgacgtctcggtcaatagaccaatggagggagcagaaccggatttccccttccgggagaccgatatcgcgtccatctactgcgactgcgtatgcgcctacatatcgggcttcctttggccagccaacggtgacgtcacatcccacttgagtgagtttgacgatagtcccgggaataacaccagacatattatttacctcctttctgtttgtatttgttagccacgcttttgtgggctaacggtgtctccgatacctcgaagcctttagaggtatagtactcccgattggccttgttgtcaacagtgattcctaccatggacgatttgccgtagacgtagagtcgagccgtgttcataccatacctcctattctgtgattaccgtatcactcgctgctgccttcaacagccttcagagtttctttcttagcccgcttaaccagagcttcgagcagttcagtagattcgctgagaacctgctgagtagcgtctgcttgatagaggctctgtgcagcgtacccgccaaccatccaccatgcggtctcagacgaagggaccagatggccgactacaatgatagggaggaacagcttaaatgtcaagggctgtaggtgatttttgagtgtggctttaactgccgcattctctcggccaccaatggatgccaagtaaacgaaccctcctgcaacccatgcgatgatggtgacgaacagggcaaagctaccagccgacgacaaggctgggaatacggtcattaccagatagataatgaaagccagagtcattgtgtttctccttgtatgttgtgaatatgtggccattgtataggaggcggaggggcctgtcaagcccctttcctcgcttaatgctagttttagtggcaatccttccaagatcgaccaacgatgtagccagcggtcagctcgataggcaccagaggagtagagtagaactctcccgcagctctcacggccttcgtggcaagttctccagcgcggcagtaagctacaaacaccccgccttcacctttgctgtagtgtgcgatatcactccacaccttgccagtgctagccaattgttcgtccttgtaagcctgagctagagctttcagcttcttctccgcctcctcctgttccttttctccttctggcttaccgcctacaagagaccaagggaacatcttgaagctcaccgacttggcggttacttccaactgcgcttcgtcgtggtacgcgatcatttgttggcagaattccggcttgttcttccagtcttctttgaaaaagtcaaccttcagaccttctttctccagcagttggtcatgaatcaccatagcacgtttagcacagataacaccgccactctggaacaagctgttcaggatagcgtgagccgaacgggtaggaacccggcgaccgtccactccaacaatatacttcttaccgttggcttcccactgtttggtcagatcgtccttcagagctttcaatgggaatgcagcatcccagaaagcatcaaacaccagttgaccagtttgcaagtcggcaccaatggttttcgccactttaccagcttgagcgccgtatgtaccgttgtgttcagggagggtcgttaatcctcccccgtaaccttgctcaagggttaccgctgcatgttcccatgcagaccagactatatcatgacgctctcgcgccctgtgcgcttcgggtcacttgaccctactctactcccttccggctcccgccgtggtttcgatagtcgttgcacctttctagatcactctagcttggctcaggattgactgttctagtcttcccctgaattcacacagttttacatgggcttgatctcttacccatattttacgtttttcgcaggagatcggttaaattggcgaccaatgatctcagaaatacgcttagccatcattgtgtgaacgtcaaatggcttctccatcataagagatttgcaatattcctttgtcggatcgtactgatcgcagtaggccgactctttacgtgcttccaaggaatcgaagtcgtatccaatttggaagaacccatctccaaccccaaacaactctcgaagctcagccccgtacaacgaggtgatccgaggaacgttagcaaccttccggtgcttcatccggctagtagcagccccgcaagtgtcagcaggcgtgggaatcctgccgtcctgacgaatgcttgcaaggtaacctttttccggctcctctccatcctccatttcgtcccagtccatgccgccaccgaggattgcgcttcgccggtgcttaaaggtcaggtactcaatcacatccttcgcgaacggaaactgttctgcaatgcgttcgaggtctggacacatttctttctcttggccctttgtgaagctagggttagtgagaaccttacagctccccttgcttgcacgatcaatcaacctctgacgtacatacgcgcgggtgctacgaggggtgatcttcatgtaatccccgaacccgtccagccgctcttccttgtacgctgtgctatacgttacatccagccagcgatcgatcttagcaacgatgttttccatcggcagcttgatcttcttctggtcgacagtgaggtccgtctctttccactcagagggaatccaaccgaactcgcccataagccactgcttgatgtgggttgtatctccaatcttagcaggcatctccgttttcagaggtacgtctgccgggagaggcagcttgtactccttaccctcaaagatcatagtccgatcatcgccctctttcaattgagcgccgatcttttcaatgaacttctgtaggtaagtggtgatctccccgttcttcttgaactgtcgaacaggtggagtgtagtctgccatgaatttcttggtagctggtcgaggaggaagcacaggctctacccgggcccgacgctcttccatcttggcgtccaagtctttcacagctttttcacagagatcaacattcagaacaaaccctcggtgctcctgataggtgatgatctctgcaaccttcttctccaactgaatcggggacagccaattcttgatgtagttgtcacggtcggacagttggtaatcttcgtggtcctgcaaccaatgccatacagcggtgttcgcctttacgtcatagatacagtagtagagcatatcggctgcgaagtcgaggaatcgaacatccggtgccaaatgcttacggaagtcaatcttggtgtcaccacctgcacgacgagacagcttatccagactgtgaccgccgaacaggtcagggttacaagtcttggagataacgagggtatcgtcgaataccacttgcttgcccatccaagtgtcagcagaccacgtagtcagaccgccatccctgtgctctacgccgatagtgaagtccatatcttccacaagcttcatcgacataaggtcgaagttaatcatgttgtgagccactacgcgcttgatcttgcgcttgagcacatagttcttgaactctttcagcggcaggtgaatatactctaccggagtgtagtccttgagagtcacaacttcttcagtgtggagcatggaagacgctttcggcagtctctcagtgtactctcgcccgtcaaagacgtaggtcggcccatcgtagaatgccagaatattgccaccgtgctcctccactacaatgcagtggtgtttgtagctaggcttaatcttgtaggggctggcagtgtaatcgatagacgtttcatccaacaggcctgtggcctcgatatcccaagtcatgttggtgaaattgttatttcccatccattcgaggtattgctcgattgtttcaaatcgttgttgcatttcctttcctcctgtaaacgacgaaagggatgatacataagcatcacccctctgtcaaccttagtattccgtgtcccggccttcctcttccttctgagccatccaagcctcgtattcacggcgcttgtcagggtatcggtccagatagtcgtccaagtcccagattgtatgagtctcaacgtcgtagtaccaattgcccatcattccagtgcggccagtccatcggcacttagagagcttcacgttaatcaggttcttttcgaactcgttctccgcgtccttgttccgccacatcagaatgttagctgcaccagatttgaagatggacgaagacccttggaaatcttcttcgtacagttccgcacctgccgagttagccttctgaccgccaccactcttacgaacgtggttgatgttgatgaacgtcacacggtggctcttggtcatacccttctgccagcgcatgaacaccgattgctcttcattgctcaatccgtccagaatatcctgaagcgggtccagaataataacacggcactcaaactgaataatcagttgttcgatttgagccttgagggctgctaggcttccgtctcggtcatcgatcagatagaagcgtgggcttccgtcttccttgtgccacaagtcgtaccgagcgtcacggtgccgatcaaggaacgccactttctcttcaacggtctcgtacaagtctgccttctcacctaccttacggctcagcagcttgattgcgtactccccgcagtccgattccagagtcacagtacccggcatatgaggcgagttataaatccaaaacagagtgaactcatccactacagtagatttacccatgcccgatgcagcgccgatattcacaatccggcccaacgggatgcctcctgccatagccttctggagcttcttagcgaacggtggcagaggaatcttctcaacctgcacagcttcatacattcgagcgtcgagtgcatcagaccctacaataccgctaggggtccatgtacgggctcgatagaatgcactgacaaactccgattgacgcccagctttcaaatactcgttagggtctttacggttcatttccatcatgaacaccttgcccttcggaagcttatcggctgccttgtctgctgcctctcgtcctgcgtcatcgctgtcgaaacagagaatgatttgctcgaaccggtctagccactcatactgagcctgtagctgcttccatgccccactctcaccgatagtagggctgaccactggagtcggttcataatcactcttaccgcctgctcgccggtcatcgtactccttgagcatctggaatgctgatagctggtcaacctcaccgcctacaataagcaccttcttgctgttgctattcttgaacctgaactgaccaaaaagctcgcaatccttcccggtctcgccgataggctctgagaagttcttcggcatgatccgctgtttgtaaccggtgagttcgtaattagtagtagtaggatatagctgagttgcaatctcgccagtctccgggtcgaaaccatgtagcactccgaaatactggcaagtctctttagacaagccacgataaccacgcggatcatacgagcattgctctttaatttgagcgttgatctctgcgttaaattcagttcccacgaaattccactcctcttcgtcttctccccgggcgtctctttcctgctcttcagagagcaaggtgtacccacacgcccaacaataggcacctttgtgttccccggtattacgatcagtaccatagacctttaggttgtctccgctgttgtcagcgcctttcttccggcattggggacaagcggtcttgtggtcagaatacaaatcgataccgtgcatagccgcaatttgggccacggtcattttggacataaaacctccttacttcagacaaccacggagtttagcatcaccttgtgttcgtgtcaacccctctccgagacgtattggtcccgcattgcacggtccataggaacagccacctgatagccggagcccagagtcgtgactgtccattgatctacagcgttctctgtcaaccactcattcatttccgagaacgtgtggaagtagatgtatagcagattgtggtttctcagtgtagccttcatggcgagtcgccttctctcatatgattgaatggcgagaaatccgcataatcttcgaacggaccactccagtaggtggcaaactcgacctctgtgagccttccgtcgttctggtagtaaccgttctcgtaccctccacactggtgacacatgcctccagtgacttgctgcgtccatccaagcccaacgtctacgaactcagcttcagttttctctccgcaccatctgcactcgggtccgttcattataccctcctacacctgcttggacaactcagaacgctcgaagaacaggtgaaggtactcgataagctctccgctttcgtcttcgtagctgcccacatcaataacgcaaccctcttcgtctactgcgatgatagtggcaacacggccccggaagatggtatcagcgtcatcattgatcttcactttgtcacccttcttcatttaatcgctccttctgtttatgcttaggcttccgcctgtatttggttttatccctctctaccgagggtttgttgactgtgttcagaaacttaaacacagggttcttcttagccatagaatactcctgatccacatttactacaacccttataccaaatgcccgtcttatggcggtgcatggtgggctccccgaagtgcatacaccggtagcagagtcgtttcatttgtcctcctataaacgtgtgaagtctttcagcgggatatggaccataacttcttggtcttgccagtctccacggtcaatcctaccacccatgctcatgtagttgacgccattggctgtcattttgacatatcctgtatagtccgtccactttaccacaaggaatgcgggaatgtcaaacaccctttgcatttcgatcccatggagccacttcatctgggacacaaagaagtcgggatatttctgcatttcattattccgagccttaagctccacaaagctaacaacctttccattccggcaggctgcccaatccatatagtgggctctaggtagcttatgaagagaacacttccaccgcccttcaagctcagaacggacggcctcctcgaccgccctatctgatgcagactcgtaagtctgtctagccactcaaacctccttgaagaagacgtactcgaaggagttggtcataatctgcaacttgccctccatgagtttgccgtccacgccttcgtcttcatttccccagaatcggaaacggcaacgctcgaaatcaagctccaagaagctaggctcaagctctcgaatatccgggtcaagaacatactcaggtttgatataaaatccgagacaagcagtgtccatcacatcccagccgttccagtgggaaatgaagtagctctctagcccacgtgcttcaactacaatctcatcacgcttactctgactcatgcttacacacctccttcagttttaatagagaaagaatctaggaaatcttggatatagggatcgagttcgccaactgcctcaataagccgcatgcactgacgctcattatcttcttcttctaagattacaacgctcatatacttacgccactggtcatacaactccattgttcacctccagttgaatcttggtcaagtacataccttgcatttcatccaagaagtaaatgagttctccctgttccaccaccgtcctgattagcgcccctgctacctcatactgtagaatgaggtgtacgttacctttcctatcgtaaatcttctctactacatacactacgataggcgaggtttcgtcttgatttacactcacaggcacgtccacttctacgacttggccagttcgtagctgctcgacggactcattcagtcgctgagcgttagccggagattccataaggtagtcgtggtcacaaccgaaggcctcgtctagggtgcttacgggagcttttgctgccttacatgcgatgtaaagatcagaagcgtcaacaactacaacagccctgtggtcagtgtaggcgtctagacgtactgcacagcactcttccttcagtcccagttcagtcatcacaacggtgcctttcaagcctccggccagttcgtcggtgtggacccagctatcttctacgaatcccgtagccagcagttcatccaaacgtccatgcgcctgcgcccatcgctttgcacatccagtgtatgtatcgcaataggccttaaggaccacccgatctcccacttcaaccttcataatctcgctcatgctttactccctctgttgatagctcgttgcttctttgcctccatgtaggcatcgtattgctccactgtccacggaggaaggtcattatccacgctgaacgggttgtcgtcaacccatacagagacttttattccaagattttccatgaatggtcgctttgccttctgtgccgtgaaatagatcgggaacccgtagtcccgtagccactctaactctccgctgttgtcagggtggcgtgcagtgactacgatcacattgaaagcgcctccaaagcccctgaaggtatccatgacgattcggaaggcaagagggtagagactgatcgtctcgtcgtagtcgaacgcaattacgaaaggttcgcccatgaatcctgctaactggtccatattatttacgctcctttgtgatatactccgtggtggccggtgccacaggaatgacaggagacgcaacccaagcagacacctcttcgtgacagacagggcactctgcgaaataatacccagtctccccggggcgacagaatgagaacgaaacatactcaagttccgatctcttagctcggagaatgcttaggcaatggtgacacttagcagtaaacaaagcctcttgaggaagcgtccctctcgaaataatttccataaatcctcctctttgtacttcagatgtttgtgtttagacataccagtccggggcctttctcacaggaggtgagattggatcaggcttcctctcgattttctcaggtgcctcccccggccacacttgccagcagtgccagatggtacgtctcttgtcattagtgtgatcgtacaacactccgtcgacgattgcaacagcatgcccctttaccgcgatccagaaccgaccttcagggttttcctcagcaaactgcctaagagtcttatccttagcatcctcccggtagagcatccgggtcttagggcaccaagtgtctgcgtagctgaagcgcttctgagtagccccttgccggtaaccgcgcttgcacttcactttcaggtgctggtgtgccttttcataggtggtgttccatacgactgcaaagctcaccaccatgcagtcgttggtttcgccatacctacgagaagcgtcgaagaacctagggtaagggtctttgaaggtagctttcgactcctccacggtcacgcacctacggttgggaagcaatctgcaagagcttcgacctctagctcccggccatcgtcatcgaagtatccgcagtcgattagcgaggcctcataccagtcccagttgtccaccccgccagcttctagagcttcaagcttcatacgatcacgtagtaggtcgataaggtcttcacggtgaataacatgcttcatttatacactcctctgcggttgatttgagattactctacacggtttacaggatactgtcaagctcttgtatgcagatagatcggtagtggaggcagacctgtcccaaggcttgccatacggattctccgcctaagacatgcctctggtctgcctctcgctctcatgcagatatacgcatatgcagatgagtcggtgagcggggagcatgggctccttataggctctgagctttcccctttcgggtcgtcgctgccctgttctcagattcgactcaggatgcgcttgcagctttcctcttcatacgctatactgctggccggtgagtgacgtggacatttctctccagcaggcctcacactttaccacggattattttcttgtcaaggctattgacacagcagatgaatccatgcagaatacaacgactttcaacacaacaggagaaaaacataatgaagattgatattcgagacgaggcaagggaagtcagcgagattgtcttcggagacaatgtagcctgtgcctgcgggcttaaaaagagcgagtatactgacgtacctgtgtacatcgcagatggcttaccggggaatagtgggagttggatgccgatccgtgatcttctagatgctgagaatctgctacgagccttagaacgagctattgacctcggttggtttaacaagtaatctatcaaatctaacaatttttaacaaggagagcacgatgaagattgatattcgagagccgtcccaaaaagttagcgagatagtgttcgggggaaagactgagtttgcaagctcgttaataaagggaagagatagttcctcggcctatattgtagctagaaacaaagagggcatcacatggcgccgcgtgtcaattagcgaccgcatggacgctgagaatcttctcgcagccttggagcacgcccttaatctcggttggtttgacaattaatctagtaaatttaaaataaaggaggaaatatgagcaattcccaagaccgcgtactagcccgagtggtgcgtatcgacgatgtgaagacccatcctaacgctgacagccttgatctggcgcttgttggaggttggcagtgcgtaatcaaacgcggggagtataaggctggcgatctggcaatctacattgaagtggactccatggtccctgtagacaaccctatctttgaattcctgcgtggccgtaatatggtcgaacaaggtggaaaagagtattctcgaatcaagaccatgaagcttcgcaaagagcttagccaaggactgatcgtacctgttcatgcagcgggcagtccagagccgaaagtagacgaagatgttaccgatcgaatgggtatcctgaagtatgtaaagccttccgagcaggtagctatcaacggaggcaacaagggcagccggactggcacttccaagctagggttccccaacttcatcccgaagacggatcaggctcgcgtacagaatattcagatggcttacgatcaggctcatcagaaggacgagaagtttgaagtgacattcaaattggacggttcgtctctcactatctggcacaaggacggagaagtaggcgtggcgtctcgaaatgtcggtttccgtctagaagacgagaagatcgggttcttcacggctgtcaagaacttctttaagggtcgtggctggaagcgtgtgattaagaaagactccaatcacttcactgcgatggcagaagagcttaatcttggtgaacgtctccgggagtttggtctaaatatcgcccttcagggtgaactggttgcaccgaatattcaaggcaacttcgagggagttgacaaaccggaatactatgtgtacgatatctacaacatttcggagagtcgttactatcttccagaagagcgactggccactctgggaatcctgaacgcgctagctgatgacggcgaagaggatgttaaacatgtgccggtgtacatgtgggacgtaggcgttccaaaagacatgcaagatgtaattgaaatggctagcggagagtctgcgttgaacggtaagtaccgggaaggtttggtgttcaaaagcatgagccgagactttagtttcaaggttattagcaacgagtatcttctgaaggaggagtgaaggagggtgaagatggactattgggcctgtgcagatgctgtcgaacgggctgggtgtgaatgctgtggaagcattctcccggtcgaagaaattgtaaatgacggcggcatgttggtatgctgtgattgctattttgaaatgttctgtgaggaggaagaagttaatgagtaaagttaaagaccatatcgaggaagctcttcgcccagctagtcgggagaatatcaacttgggagacttcgtactaactgaacgtccagatggggagaaagttccggcgtttgttgtagttatagaaacgccggagcaggaaaagcgagaaggctatgtgccactccttgtgtattttggcaatggtagggtgggatggaggtcgtggaaagaagtctacaagacttctctgagaatcgatccaaggcttattggtacgtgcgtctgggtcgagggggctgaagctattagtcagcttgaggaacagggtgtcttctcgtacattgatgaacaagagcttatcaaaaagtgctacgatgcttggatggagtggcctttcagtactgcaattgttgaagatcaagagccgacgttcggtgaactattcgaacgagagtccgtcttcgagtttgttagcggttttaacaaaatgatgactggtcttgaggttgttaaccgcaagtggaacaccgatctggtcacaggcgagccgattaaacgtgatgctctgcatatgctgatgctcgttaccactgaaattgcggaagctgctgaaggcgtccgtaaggacttgatggacgatcacttgccagagcggaagatggaagaggtggaactggcagacgctatcattcgtatcatggactatgcgaatgtacggggtctggatgttgcaggagctatgatcgagaagatcgagtacaacatgacccgtgcagaccacaagcgggaagctcgccttgcagaaggcggcaagaaggtgtagaatgagcttgcaatatatggtgagtggtgatgagcacatcgacgactatgcaacgtatgagttgagttatcccgatctcaaagccacgtataaccgcctgtcgaagctggacgattccagcttcaaggcttctatgccagaggtattgcacttctgctgctttgtagcttggataaaagagattcctagctctattttgctgggagacagaggactgatacaccttatcgctcaccacattcatgaaggagcggaagacgatgggccacaggcttttaagtctctgaggcatcagttcaacacactaatgaagttagattaaggaggttttaaatggaattatttgacgttaagaaagggcaggttgttatggttggcagtctggacatagacattccgaggccgaccttcgaaaagaccaacgctcggatgaccggcgtagttgtcgatattgacgagggctcgatgcatcggaatgttaaagtgctgttcgacaacggggcgatggactggggcaacgcgtccgatattaagctactccattccggcccagaggctaacaaagttcgcaagaagctggctaagaaggttatccagaagcttgatgacctgttcgatgaagtttatcaagttgttcgctgaaaacccataacaaagagccccggtaagctttcgctcccggggcttaattattcttgtttttcttttattctccgctcaagttcgctaatcttccttttaagcgagtcgagttcttcatattgcaaacgggattgccgatcctgtgtgtacgaggccgagtttatctgatcctgtagtctgttcagtttgagttcataccgccgctcagattcgctaattcgaatctcgtaggtctggcgtacagagtcaaaccgagcctcgggagtcatcgctgtgaaagccagaatagccatacagacaaggagggagataaacaaagccccgactgctgaaactagcggccagtcttgtttccttgtcattatattgtctcccagtgtgggttaacgggttatagttattgagtttctgtatcccgacccttgacggcattcataatcaaaatcaaataccggttggtttcttgttgttctcttcttacgttactaatttcactttcaagtcggctattgaatctcgactctagtgcgttaagttttgcctcggataccatatctctttgcatcgcaaagatacgttcttcctgcttagaaagactggaacttaggaatccagaccaagccattaggatagcaattagcagagagataactccctgtgtagctaccttgattaggccttctttgccgtctttactttccatatagagccctctgctcttctgcccatagctttattgtctgtagttgactattgcacatggcagcactgttagtatttagaatgtaagctctagcgagccccttaactgtatcttgctccactcggtataccttaacctcctcggtcaggcttgtcgggggcacaataaggatcgtttggtactgcggaacagaaagctctgtcgagcaagcttgtaagagcagggtccagacgatccccagtagaaggctcagagatcgtctctgctgcattttcttgggtctcccttggggttgggttgggtagggattcgagttcacacaggtggccttgcagaagctcctgtcggttcttcatttgagctatatgtgcctctagtctcccagtggtgatctcacaccctgcccgctctttctggaactgctcttccatctgtcgagacgcagcttgaagagattggatatcattcttcgcaacagctaagtcgccgtacaaagagaacgacagatatccaaaccctgctgccattgcggcagctactacgagggcgtagtttttgagtttagttagtatcattttctattgagccatcttctatggtttccgaaatcgcttcctctactttaccagcagttacgaacactgccgaaattctcacaccgacagctaccagtgtagcgactgcggcgaatacgccgggaggaaggataggttcccaaagatggaccatggcctccagagccataaaagttgcagagcctacagcagcccagaacttccagcttttgaatagcttcttcattaggaaccttcttagatttacttgaaggattgataggcttctgctagcttaacatcgtagttgtttttcttgtaatccggcccgttataccttcttgcgaattccgcccagttcttggatttcagagctttgtggattgcaggattgatcttgatgaagcgtacaaaagtgtttagttgcgatccttcgctggcgtactgggcattgacaaatgcctgaacactcgcataacctagtgcctcccaatggaatcccataatctggaataggccccaagaggcactttgaagtgcgcagtctctatccattttgactgctttatctagacgttcgtgctccgcttgtccgccgaggtatcctccagctttagggttgcaaacgtcgtttatttcagggtcacgacctagcttccttttgagaagcttgaacatccagtgcctttcgaatagaatcttagggacgccagaaagtagaaagccgctcccacgactctctactttagtgacggcctttacactggcaacatcgactccgagatcatcggcagccgattggaagtcttgctcagttagagccatttttgatactcctgaattacagggtggaagtgatagcaaaccagttgaacgggtaagaccagttgccccagttgcagctaactctaaacccggtgttgctccacatatccgtcatgaaagcgcccgggccgatggagttgttaaacgtccccattacggtcacttgaacgttcaagattcgtgctggaacagggagttggatattcgtccttgtgtcatcagacagaccgggaccagttccccattgtagcagaaggccgtttggtagtcgagcccatcctctggaaatatccgactgactggactggaagtccatagcagttgtattcgcaggaagaccccatacatcgagcgtagccgctcccttcaaccctaggttgtttctagctgcttggacgttcgtgaggtcggacaggttatccccagacgacaggaagtctcctgtatttctagtagaagctgtgcctagccctaggttggaccgagcggtagcagtgttagccaatccagcaaggttgtctgccttcatcataaccgccgcagggtctgttgtagccatcccagtgaggcctaggttgactctagcttgtgccttgttaggtacatctgctaggttctgagcgctcctcaagaaataggtttccggctgggtagcactacttgtaattccaagattcgatcttgccagcgccttgttaggcacatctgccagattgctacctgccttcaggaatgtagaagaaggcatagtcgctgtatccgacagtcctagattagctcttgcggcagtgacgttagacagaccggaaaggttgtctttcttcttcagatacacctgtgcggccttgagcggactcacagccttggtatcattggctccagcttctgtctcgatagtcgtagcaactgccataaccccggctacagtctcggtagcaggaggaacgagagtcgatagctggctcagcgggatcgcgtgagttggctgtgtggcagtggcgacgctgaaaacattagagccgttcccgtgcttcatagcgtaccgggcgtcgccttcagctttactatacacacttaggttttgtcttgcaataactacgttgccaatcccagagagggtgttgtagtttgttacatgccgatcaaggttggcttgaaccttagctgcctctcccgcatcctcaaacgccactcgccaatatccggctgtaatgttcagagggtcagttggaatcttgtcggaatgggttctaaggcacttatagatgatcccgttagcgccttgagtgtagctcaggttaccctgatactctgtgacgctatcccattcgggaataccgtgctggttaacgtgcgcgttgaacaagtcttgcttgtattcaatgaagttggcagtttggtagggaggtagttctgtcacccatccaagcccaacttttacagcacccgggtcaaccttctggccgttttcagaccagatagcgttaataccagtaggcttcataatgtttggcatatattacctcgccttattctttaggagctttaggtttgctcttttcggatgggaagttcttgtgctctggccatttacgtagtgcagaacgatacttacgccaagccttctctcttacttcgtcttcatcgtcgatagcaatctctacttgacggtcagcccgggttagctcgttgtctctccacaatctggcttcaaagtcatcatatttgtcctctttttctaccacttccatagagccatcttcaatcgctgcggcgatcttcacgtacatggagtgagacgtagggcatccctctacagcgccgtaaggaatccatcccaattctggatggtttatttcgcactcgaaccccgctttaatttttacaacgtttctgaattccattaaaatcacctccagttataaaggcccttacgggcctattttgttaatctgcaaccttctggaacaaggtaatctggttagaacctccggctccgaacctacccatgcacctgtagctaccggatagcgtagttccgtggtagttgacgggagacgaagatcttagagacgtaccagctactacagtcccaacatccccacttccgctagctgcaatcgcaaagacatatgttcccacagcctgagcactacctctagaagtggcagccaagatttgggcatcagtcattacgtcagtttttctggcgtatacagagtctacccagttggtaagagtcccataagagccgaaagctccgccagtaaggttgccgttgctgctcataaaagcatcgccgcagtacacacggccagcagcctgcacgttcccggcagcaatcacgctgttgccagagttgacgttgccagacgaattgagtgtcgcagcattcaccctgccaactacagtcaagtcctgaccagccagagacatgcctgtcgcaccgcctgcggtcctgaagttcagagagttggcagacgggattccccaaataagccctacctctgctccatcattcctctggaatactaggtgagcgttaccagtgctggctcttactctaatatagtctgttcccagaacagcgccaaacgctgtaacgccttgtactgcgatatctcctgttccgctcctcacaacaatctgattagtcagattggaggcggatgccggaattgtcgcggagttggccaatcctgtaatttgtgcaacagggactgttccgtagtcgagctggcctagtctagaaaaacgccatagaggggtgttagtcgttgcgtcccagataccggaaacaccgttatcttgcaaccagaagtacctgctcttatctgcgttgtacagcacagtctgagtcgtgttctgtgccagcctgtcaaccatgagccgctctctggcttgagtttgagtagctcctagtccatactggtttcccgcgtggaacacaacattagagttaacccgcagagtggcgttagccgcttctggccctctaaattgaaataccaacgagctgtcatcaggagccaccaagctaatccaatctgtatcagatttatttctaagagccaactgggtagtcttatctgttccggtcatgttagctccattaatatggagcctcgctacaaccccggcgtagcttgtatctaggcccggcagaacaatgttctggcttccgtcgaacgctacgccgttaatcgtaactggagccctgagcttgctggctgtagtcgcgttaccagaaagagtggctgtaatcacaccagcgttgaagttaccagcagcgtctctatagaccagagtgtgtgctctgttggctggatcagccgtgatagtagcagagttagctaggcctaggaaggttcttgcgttagttgcatcacccgcgttgactaggcctcttccgaacgctgtaatgttgaaggtagccatcgaggtgtcggtgttgaagtacggaaccgcgttggcagccctagtcacagtagacaggttagacaggacaacagaactctcttgagccgaaatgtagtctctagctcccgctgcgttggctacgttcagcatgccacgtccataagccgtagagtcaaacacacctgcaccagatgcgctaatgaagaaaggaatccctccttctctcggagtcaggcttccaagtgcagagctagctgtggtaaagtctgcgaaagctcggacccagttagaactaacggtggccgggtcgctacctgtatgggtacggacagccttgtagacgaaaccgtttcttgtgcagaacgatttgtttgcaatatactcttgagtgctagtccactctgggatgcccttctgtagcaaatacgctaggttagtatcgtgaaggttccacttccagttccaccattggcgaggaaccgactgaataccccatccgccttgctgctgcgcaggggtcggggctaccatatccccgcctgtggaccaaatattttcaataggtagttgaccgatatcagccatttataactccttatgtcactaggttggtcagaattccaccaacagtgggatcgtttaggtctccaacgccttgtcctccggggaagccttctgtagcaaatacccggccagcttggaactcagtgtatgtgtagttaaccccgatagtcttaggaagcaatgcacctgcaccacctaggtcgaatagaagactacgctctacgttcgttagaatcttaccgatgccgatacggacagcagcgggagcgtactcctctaggaatacttcaggaaccccgaatacaaatttataagcttcgataacttgctctggggttgagtttgttctgttcttgatgatctttgctttcaggatcatccgatactcttcatcgctcggctctctggcgttaccagttggagcaccgaccgagtaccatggagcaccgaccgtagggtccgacaggcttccgaaagaacctgcacgctccgttccagagaatccaaaatagttgaaaatatcttggtacactagaccgcgtggtcgccctacaatgtctccgataatgtccagttgcttcccggtggctgtgtccagagaccggagagtctggaggtcttccagtgcattctggatatcaaacttaccagacaatagcacttgcaggaagcgatcaaagatcggcttctctttaaactgttcagtgacccgttcccgggccacctccagataatcttctctgtcaaattggttgacagccatggaattctccttctatcattacaccgtagttacggtgatatctgctgcggcgaatgtagccacttctttgaacccgatctcgatgttcgccatgccttgagtctgtcctttcttggcaatcgtcaggctgttaacttggaagcccgggacttccatgattggagcatagaatcgagaataaattacgtcgtctccgatcttgtaattctcggtcccgtacgctacaatccttggccgtaggatatcttcaatgttctctggcatcgatcctgtgtttgttacactgatcttgatctcgattggaacctcgacaggtcgctggtagttgactctgtgagtgtagcctagactgtctactacctgaacctctgtatctccgacagaaccaatcccgaatggcttgttcagccagatggactgtgcaacctctgtaggaataccaccaagaacgattggaaggaacgagtgtcccgggactccatgaacggggtctgggttgtcggtatcgttttcaataatcctaacatcctctaccccttctacgttcatcagaccgtcgattagggactccagaatgttggtggcttgtacgaatttagagtttcggaatctctcgcgaagctcatcgtcggtctcgcgcagacggccagtgatagctggaacagggttgataacgctgtcccatccggcaataggaatggagatcgtatcgatagctagagcttgctgaggcacagggccaataacgtcgtcaacagcgataccaagctttctaaccttctgaatactcaggttggaggcttcttcgaaagtcttggtgttgaatgggtcaataggtactatgaaaagtataccattctgttcgtagcttgtcaaggtatttccgtgatttgtagctacgtctgcggccagtcctgctaggatggactcggatgttactgtaccagtggtagggcttgtgtacttgatagacgttgtgttaatgtcatcaacgtacatcttaagctcgtatgtcaggtcgttgcctactgtctgagggaagattccaacaccagagcagcccttcgggctaaggatgacgccctgaagcaagtggaaaactcggcctgtactgctggagatcatcttagccggaggcgagttgataactgtgttgatgttaccctctaggataacttgtgctctggtagggcgagccggatatctgctaatcgcagagaaggataccagattgtccagagctacaccagtggcagccgaggggttgaacgagttgtaaaccatctggattacttcccagattgcctcgtccgatggagcaactacaccgataagacggcctagagcagagttaccagacgtgtcaacttcgtctccagttgaaactaggtcggcgaagacctgagaggctacgtttctgtagtctgtcaggatttggtccaagtctttaatcgttagaccttctgctgtaattccagccatattaaactcctatcattctgaaagtgatgggaagggattctgtattgtctgtggttctgactgtgaactccatggagtattcacgtgtgtgagggtcgatccccgactgccaagatgtaatctcaaggacgccggggtctctcataatctcagattggaatatcgcgtcaacagcgggaaggctcctagacttaccaagaatcctctcgaagtaggggatgccgatcctatcatccaagaaccactcacctaggaatgtgtacagtttgatctttagtcgctgagcaacaatatcaaccattcgttgagtgactggagcttcaccatttataaaaaccaagtcatgtgtgtcggggttgacaaacaagtccatatgatctcctttaagcttgtgggacagcagtaacaccgccgcccggcataacaccaccgtgtttgtgagtgtggaatggaataccgttgaatgtagaagttccaccagtctgcacgtagttgcctgtatgtgcaatgttcccgttccatgttgtatgtgctgcatcgacagtgagcgaagcgcacttgacgttgacattttgagcattaatgcttatagtcttacggctgttgattagaatatctccgttggcttttatcctaacctcggcctcttgtccagtcatcaggttgtgggcaatagtgaggtctttggtatcgtgcggccaactgtgtcttgcagggtcgttcatcgatctagggaatgtgaacagcccgggaatggcaatggcatccgccatgttgaacttacgaagatcgtttggagtgtgaggctgtccagtggcagagcctttaaacacgtccatagttctttgagagaatacacacaacaccgtatccccgacattcaatgggaagctgataagggtgttagctgttcccggcataatgacagggacagatagaatctctggttgttcttctgatgtgccgtctttgtacaggtcattgaccactggtctaacatcgacagaaaggcgtctaaaatcgtccagaacgcgcaataccacacaaggtatggcagtatactgtttcgagccttccgtggacgagtgcaggttcagaagctcttgtaggcctgttctcctcattggtcaatatcctcttggttaagatcggaacaccaacattcagtgtaccattcgttgtctctgtatccgcccgagattcggacgttgttgattctgaaagttcctgacaatctatccgactctacccggacaagaaccccgggagttagctcaggattgagaaggcatttgaattgaacgcctctccgtctccgcttatctttcttctgtgccgttccgctggcactggcgtagaatgggatatcgatcagaccggtctctctgtttacgagaggagccatttgaacactcttcgttgttggtccgttaacgtctgtgacgtttagaacgtttccactgatgttccattcaatattgttggcttcacacacgctgtttagagcgtctttggccagaccacggagttgatagccgtacatgatcgggttattgcaattgaggcctgtataagctcctctgtccactcccggcatttgaagacgaatctcttcgataacatcctttacagttttgcccggagatactgtgcccttcagcttagtctcagttagagcagtgtaaccctcaccaagaataagctgagtcacgtagtcgtttccactctttcttgtggatgtttcgacaacattaccatctagaacaacggaagttccagcttctttataccccacttctagtctgcaagtaaggtattcggtttcaagaaggtttagagttgcaatcgacagattgtatatctcaacagtagccgagttgccgctctttttgttatcggagcttttagagatatcgaacctgaactgaagtccttctctgttaacacttccgtcaggatgaaggtttgtaatctctactccctgaccagactcagtattaccgagcgtcaatttatatactctgtcgtattgtctcactctgcatcttcctccaaatcaacattaacatacagaagttcaaaaaactgaggtacaatgtcgcttgcatcgtgcttgtacttcacctgttctaggttgacaggcatgagcaagaagtacccattaaacccgatgtgctgcatcgcgtaatctgcaattatcgggtattgtggaatcaatgccaaccctgttaggattggattaagctcctcgtcgaatatgtccatgtgccactgcctagagcggctattccagtaaaattggaggacacgggaaatgccctccagagctaccgcgtatctatacttcctatcttggtacaaaggaagtgtgtcgatataagtcgtgctcatttagtttacctcgcaacctgagttctaatctgagcctctttcatttgactacgcttgaatgtaggagagtcttggctggtagcattgctagccccggtatcaccttctttggcgtctctcttttctttcttagcggtctttctacccttgttaaccctcacctcgacataacgagtatctgtgaatgtcacagcctcgattgtcatacgaggttgaaggctgctacctgtctcggcgttttcagtgaaagacaaatcggtgaagatgcatctttcgatttgatcccagatgataccttctcggaagtccagcaaactgaagacctcagcattacgctgcatgtcgatcagttggcgctcaatatcataagcgactttatcacccttttgagggaggacagttgcagaaggaatctcaggaggaataaactgagtaataacttccgggaaaattcggctcggatcaaatctagaagttgtgataacagccggcacactgaccggctgcgtattcacgaactctttgttgttgatcttgtatgtctgggcctcgttgtcgttgataacgggcctgttcaagttgaagtctgcgtctgatacgacggctgtaagagtgaagactgggttttctgtagtaatgtggtctgtgatttttcctcccgtttcgattgggttggaactcacagagccacggtactgtcttccgaactctgtaacagcgtcgaaccagattaggtctccgttctctcttttgatagcaattgtcattgggattccttataacttgccgaagctctggagatttcttcctcaagaacgttactaacgatctctcgtactcgctcttgcgcttcagttgtcatgacgttaccctgagcatcgataccagaaacattgaggttgaaactaatgtcaatggcactcttcttgagggcaccctccatttcgtttctaacttgaccacgttgcatcatatacccaaactggtctggagtcaaggactgggttgcacgggtatgagtctctgtctggatcgcgtcaatgttctgagctactagcctgtcaccgatgaaggtggccttgtcttttgcatcttccggattgaacatagcgtacatcgtgtcgatgttcgacattatagtacttctgtctcctccggcttcagcaatcttagcgtccctgtacttgccggctattgcgaatctctctacaacactgttgaagaactccatgatggcagcaagttctctcatcgtgctgaccagcatttcattgaactctagacctttgagcgcttcagctagccccgggacaacagagaagataccgtcgagattgttcttcagttcactggattcactggctagcttttcgaatgtctcggcagcttgtacgttgttgttcaagaagtccccgaacaccgaatcaccgccttccaagaagacaatgaagtcttccagtgccaacgcaccccagctaatagcagagatcaacctgcccataggggtcagcaaggctagggtttgagccgtggtaaaagtcagccctgtgccggtcatgttgaactgcttggcaatgttctcccactgggaaccaagctcccctccaataccgaccagagcgttgacaggcctcataagagcttcgaacccgccaccaagtgcagttaccagaggaagcgcttctttcatgccttgggcagcaatcttaaagaagtcactcatacctctatcgaatccgccagcggcgaatgcttcgatagtgcggttccatccgaactggaatcgaccttgctgagctgcggtgccttgcatagcagcatccaaagcgccacctttacgggcttcttcagcgagagttctggcaaatggaatcagggcatcacttttaagcttcccgtcttccatcgttttcatcagttccgcgatagtcatgtcttgagacttggccatcagagctacagcagcggggaatctttcggccaactgacctttcaattcttcggacataatctgccctttacccatcatctgctcaaccgctcggaaagagcctttcatcgcttcgccgtcaaggcccatcactcgaccatattcagccatagactggaagatgctgtcaacttgttccttgctgaaatccgatgcctgtccagcagccatcatcttaacataggagctaccaagggctctgtcgtcaagaccgagacgctgagagatatcgcggagggtggcttgtagctcttgaccaccctgtactccaccaccgacagcttgcatggccagacgttgaccttgcagttcttggttagcacggttaagctgcataatagcgaacgcaccaccaaggccgggaataaacccgcgtccccacccggctagctcgctaccaatccccattcccataccttgacggatatggccggcagtacctctcgatccacctgcaccacctcctcggatggaagactctaggtcaatgcggattctcacttcgcgtctgatttgctcaagaacatcttgaatctctctacgaagatgggcacggtctacagacagcctaatttgaggcgtagcgacagcaagaccgtttagcctaccctgcacatcccttagtgtgtttcgtgcattctggagcaatttagagcggctaatgtctgcattcagatgaattttaaaacgactctctgtgcgcttcttccattcatacagcgtacggctagcctgagccaagcccagttcaaccggtagatcgaccttggtctggccgagagccgtctttacgaagtttttctgatctcggataccgctaaggtctagcctaacagacttcaacctgatcggcgttgcattcagtctttcttgaagcttctcagagataagacgaacagcggcagcatctaccgcgatgttcttcaagactaccctttgagtggctgccttggcaagctcctctctcagagtttttgtatctagagttagcttaactccaaaccgcttgttcgtcagcttggagaattctcttagccgggcttcgaccccagcgagcttcttgtcaaaagcagtgagaggccgggaatcgactgtaaatttaagttccccagttagctgggcaatcctttctgtaatcatttcttatcagcctctgcgtgttcttttgccacttgagtgatagtatcgtgaacgtctataacctcaaggatgttgtacaaatcttctgtagtgaggactgtactcagttccccatacgtcgttagcttgagagggtgagtgatagccacataaatctcccaatgctgcgagaacttctggtgggcctccctaaccctccgatcactctgaactcgatcagtagtgactgaagtctcggactgcccatccccggtctttataccgtcggtgcctctgcgaaaccgattagagaaaaaaccgagccgaagttgaactcgatcacgtcttttgtgagtgcgtacagcaggtcatacttgccagcgaattcggtgtcgaaattgattgccatcgaacctttgaaaactgtcagcatcagattctggatcaaattctcaacaggaaccttgtcgatgttatcgaacagttctttcatggctccagagaagtcgtggtcagcttgatacttggcaagggatggacccagcaagctggttagctgcttcagtacgctgataccgcgagttgctggcagaaggttgatagtgtattctgtcccattgtggatgacagtacgttggtttccgaacataaatactccttatttatctgaggtagctaagagcgccttgaacagttccaaacacgtcgaagccgacttgctggtttccgcctaccgtgccatcggtccagtccagaacatcaatagtccagaccctgttctcgattccatcggtgaatgttatgctagggtagccattgacataagcgttgtctgtgctcatcatggtgctaccgtgggtatccttgacagacaaggtgattcgggcggattgtgttcttcggtcttgctctactagcgagaataatgcatcattagacaccgaagtctgaagaacctcgattctaatctgcgcagaaaggtctctattgaagacccgggtgtggtgccctctgattcctcgaaccattgtgtagggtctcgaaagccaagacatttcgaaagaaactacaccagtgagagcatacccacaaaggacaattttaacatcagatgggctatatgtcaataccgtgttagccattagaagcctccgaattgcgtaagggctggcagaagagagcttcccagcaggatagcttgctcgaccaaactttgatcgacgtttccgccaatgttcatggcgacctcagagcaccctagaatccaagtgcgggtctccagttgtccagagaaagataccctaggtaggtcttccacccatgctgtcagagctaggaagcttgtagaacccttcgtgtccttaatcatcagtgggaattttcccattcgggttgcaatgtccacgttgtaaagcatcgaaaggatatcattggtcggcgaggattgcatgattgtcaactctactcgccagccttggtctttgttgtagacccttgcgatttcaccatccatcgaaccgtgcttgatgaaaggcttaatatcttttacaattctgataaactctccctctgcgtaccctgtcacggaatggataccagcgagagttacaaccacgtcacgcggcgagtaggtggtaatcaatttctatcctccagaaacaacaaagggagccacccgttaaggcagctccccgtcgatgtggcataagcgctatattacagccagcgctggtctagtgtgacacctaggttacgaagagtatccgcatcacccgggctcagcttggcgttaccgccgattagagtttgcaggttgtgtgcatgaataacccaatcgcgtgtctgcatgctgttcgagaagttagaacccggaacaacaccgacataggcgtcatcactgaagtagtcggaacgaccagagttgtctttaacgtggattgtgaacaatccctcagacgaacgacgggcgtcgtcgtagttgtaaagagcagtcaggaagtcgttcgaaggcgaagtttgttgaaggctaacagttagagtagcagacttagaggcgttgtagacgcgagtcgatgtgttgtcggctccggtatacatcacgtaagtgtcagcgtttctttcaatgttaacgatactgtcttcgctgaatccgccgagaaccatgctctcaccagttgcagggtgagtgatgacaatggtaacatcggctggagagaatgtagctagacgttgaacagccatttatgagtctccttatgggaaggaccagacttatacagtcacggtccctcggatgtgtacaaagtgaatcgcgcctgctagacgggcttcaaactcgatgccttcgaagatacgctgtgctctcatgttcggagacatggatagaacatcaggtacgaagactttaggagctggagcttcagccagaccaccaacacgaattccttcgttaagctgggctctgatttccgattccagaattgttgcaccaacagagtcgtaagggattttcttggagttggccatgcggaaccacagacgctcggtcatgcgggcttccagccaatctacgaagatcattacgtcaatccattcaccaccggccatagccccaccgaatgtacggttgacaccaccaacacgctcgaacgtggtaactttcttgttcttcaggttggtagactcggttggagtcagacggtaggcgtctacagcggccagagctttatgggtccatgtgttgctacccggttgctcttgcagttggtaccctacccaagcacactcagggaattgagcgtcagcgtttggatggtaaattagagccgtacgttggaacccggcagcaaccagacgagaagcaatgtcattctctgcggaagtcttggtgttagcctgagcagtggctccgataaacactttcttggtgccctcgatatgagtagctactgccatgatatcatcatcggcgtggctgtcaatgctcagagcataccattcgtcgttttctccttgaactgctgtgatagcagccggccaaccttcagtagagggagcagcagccatagtcaggttagaagaaaccttcaggctccagtcttcgttagaagcgacggttagagttccgtcttcgttgtctgtgacggttacgccggctaccggagttacgtcataagctgcctttaggcctgtggcaatcagagtagcagtgtcgtcttgctggctaacatagctgacaggtagtccgttaacggtaaggacgtagctttgtccttcctgaacaacactgacagagacggtagcagaaggaacttgtctgcgtccgataactagactgcgtggcttgagagcttgaccgaagtagcgaacagcggcaagatatgttggatcggattctccgaagtcttcagcgacacctttcaggctgttgtagactctggcacgttccgagaagtttgtgtgagaagcgatgaacagaggaacgttgaagtttgtctgtgcgacagcagcagtctcacggctgatctgaatgtcaattacatcagtaagaacagtcattcctgtctcctattagtgttcgaagtttatgtcgatgtgggactcaataatgtgacccgggcgaccagcgtcgtaataaacgccgtgaatatcagccccagcagcaaactcttgagttgtggtttctatcacagagaatccaaattcacatgtaacttgatagaacatgtacatatctgtttctcttagcataggaactcgtcttgtgctagggagtttgaaaagggatagattaaactttctttgggcggcgtgtcctgctggagtacgcagagcccgagtaatcgccattgccatgtcagagacacttgctgtctctccatacttgccaactagttcgaatacgaccttggctgcgaagtcctgttgaacttgaacagttccatgcgaaggactaatgggatcgctcatgttggagacattttcccttcccagttcatctagcttcttaatatcgatagccagataaggggtttgcggttcctgattatttgtgtatgcttggatgacacgccaatcagggaacaactcttttatcataagatagagagagttttctagctctgtatggatcatgctgtactattcctctctactctcatacaaattgctttgtaatggtttaggattcccatcgaatagttgatgactttcataacttcatacaactctccttcccacatgaatctatcggcactccaccctcccggtccttcctttaactggcgaatctcttcgcctctggagtacaccttgaagcaagccttgcttctgtcggcctctggaaggatacgagtgtctgtcgatttttcgataggttgaacgttagctgtgattgtcactactgtctcaactggaggggtaggtcttccaaaaccgtcgtctccgggctgccctcttctaatcaaatctagcttgacaaagttggtcatggagaaggtaggatagagcattattgcctccgatggatttggaacttgacagactcaagcatcttgccagtatggaacaacggatcgttgaaccctttgtaagctgcccatgcgggactgttagagcccgggtagtcgtcaatgttaacttgcatctgctctgcaaccattctgcccagcttcttcaggagagtattaacctgtcttccatcgcggataacgttttcaaacgtagacttcattagtcttgcgtagtggaattgagatgtgaattcttcaaaggttggagccatgaatggccgggttgggttgcgagtagtaccgaattcgttgtaagctgcaacttgtgcaactggtaggtttccattttcagaaccatatcggtcctcggggaagaaaccaacttctaccgttgttccgtctagagcctccaccctcttaatcaaggatgtgaggcgacggcgatctgttttaaaactgaagcttgccaagataatcacaccccatgctaaggtcttgaggaccggggttgcactggttgtaaagcttctcccgtcttgcaaaaccgatgtagaattcccgtgttacgttgtcggggtctaggtcattagccagcatatccgatttggagataccgccagcatatggcacggccaaagaaattgtaatattcgggtctttgagaatgagctgaagagctttcaagtagttgttgaaatactcagcaccatatacttcgatatcacctgtacgttctctcattccccttgtcaggcggaagagcatcatacgcataagttcaagtgcggctcgtctttcgttgccttcgttcttgtccaacacccattgataggtttcgtcggaaagcatcggaggctcccacacgtcccctacaatctctcgtagacggtcgatagggttgtttgctggatcaccagtgtaagccatttttggtaccctcctacgacgaaagggaggccgaagcctccctgaagtctttacgcattcacagtgccgcgaacgatcatctgtggacgacgcagaacgtggatgaagttggactcggtttcgatcaggatcgaacgacggtcttcagccatacgctcggtagcgtacagttctttacccagagttcctaggtcatcgaaagtgctgcccggtccgaagtaacgagcgaacaggtcaccgctgtcggttgggatgaagtaagcatcgccagccgggatcagacggttgccgtacgggtcaacgccacggtattcgatgaagtgaatgtttccgaagtagaactcacggaagcgaaggtccagaccgcgagcggttagacgttcacgccagtattgaggactagcttggtaagctttgtagaactctttgatgctcggatggttaatcagggcagtgaagaactcaggagagcacagggcaacgaagtcaccacggatcagaccgtcttggctgttgtcttgcatatggacgaagatttcttcggtcttgcccataacgtcagcggtagggttggtcaggtcgaagccgacaaccttacgagttttacccatcaggtcgtaccagtcgtactcgatggttccggctggggcgtagctcttacctgttacgatagcgctaacggaagcaacttcagcggtgttagcccagttgcgacggatggtttccagcttacgagcacgaacctcgttcagagtttcttcgcggtcagcaccgaaagcgcgcttaccttgaatatcttctggagtgatgtagtcgtcttggttgaagtgcggaatcgcgaaggcacgcagttgacgacgttggtcgctagcaacttggtgacgagttccacggatggcatccttaaccagaccgtagcgagtttcgatctcttcgaactggacagtgttctgagtcacaccttcacttgtgaagacgcccatgttctcgacgagggtccaagtgttcgggatgataagcaggttttcagtctggtcggcaatgtagaactgaccatcgtttaggtaggaacgggtgttagccattttttaaagttactcctagtatttatttactggaacgaccctcgcttacgcgaaggtaacgttctcgaatgcgccttcgatctggtcaacggcgaagatgttcttggctttgaaagcttcaaagacggtagctttatcagcgtcgtcaacgtcagcaccgaagataacagccttggagccgatcttggcaaaaccgcgagcaaggacgacagcgtggctcatctgagcgttggcatagtcgtgcaggtcggtaattaggatgtaggtagcgtcggcgatagtagccttagttaccagcttgccagtgctgtctaggacagaaccagttgttttaacatcaatgtcagcgacaggcagagtttcgcgagtgtagaacaggccacggtggcccatttgttcttctttcagccagttgctaagacgctgatgatcttttgcgataatgttttgagccatttggaattcctctagattggctagatattacttggagccgtggcgagctttcaggatagcggcaacaccggcgacaacagagtcgtcttcttccccagcgcccgatacacctttctcgacaagcatgtcattttggtcagcagcagctttaagaatgcggagcgttcctactgtttgtgcaaaagcttgatcgtccagaacttccagagacttgaaagtatcttctacttggtcagccgggaggacttcagccagttgctctttacgggctttagcgatagcagcggttttctctgcctcagcagccttgacaatttcacgaagagctgtaagctctacattagcggcgtctagttgcttctgaacttctgcaacagcagcgacaccagcagctttttcaactgcaatagcgtcagctagagcttctaggtgggccgatttcaggatagtttccatgttggtaatctccttggatggattttcattggattgctcggagactacctccagagccttttcaagcagttcctgatcctgtttaagggaaagggtctgctcaggggtaagctcggagagagcttgattcaggtcagccgatttataaaccgacttaagaatggacatagactcgacccgctggtcgatccagtctttgtgatctagttctggatactccgttctgccatatcccatggcaacagagagaacttcggcatcttcataatacatcccgaagaacttacgaaggaactcagggaactgcattgtgactgtaacttcagcagctttatcgataagctcttcagttacgccattggtagcttttgtgattagagtagtgtgcccgttggctgcaccaccttggagcttactgaccagagcgacatgagcaccttcgtgttcaaacttgatatcggtcagtttacgttttgcttttacggtcattcgatatcctcgactgtagctctggcaccgatagagacgcctgtgaattcaccagatttaacgccttcccatagtgcatcggctacttcagagccttcagggaagtgccaccactggagccatgtacctttcttgatctctcttccgtcgtcagttgtgaatgcggatggagcgatgaaggactggacaatctcagcttcctgtgtttcaatcttgtggaagatattagctacgttgcaatgagtattgaagttgatgcaagctttctctacttcctcttcggagtaggtgtctgcgtgtaggtcagtcgtggagtcgccttcttggggctcaagaacgacaaacaaagccatcctcttttcattgtctagggactttgtgacctctacagccggggcttcttccgccttggcgggagccccgaaagcattgctgagagcttcaataacactttcaagagtcagcattctgtctccttatgcgttatttgcagcggcgttgtctctaccggctgcggatgttgatgcaccattacctactccagctttacctgcttgagactgaccacccatgatattatccacatcaacaggctcgtcgtctggtcgaggcttaatcttgagagctttgcgaatcttgttgtaaacctcacggtcacgttcaagaccaccgacagaaccgattctctgaatccctttcgagaactcttcaagatcgatttcatctagctcaccgtattgcagcttcggcaagtctggactataatcaccgttcagtgcgaacagcgtaggaatgagtttattatctagtacgtctttgatttcgcggagccgcgattcaatcgccatagccatgatgttagtcttggcaccagctagagagtaagaaccaacttggtcctgacccatcttcagcatatcggcaaacaaggcttgcagaattttgttgtcccagcgacgaatgatggcatctgtatcatacatcttactgccctgcgaagaggtcagttcgaatttgaacagaggttgtcggctttctgggtcaaacgcttgaggaaggataagtccagattgttcattcatttgaatgttacgaattactcgcttgtagtattcgtagactgccctctcagcttctgtagcatcttcggacatatatcgaggaggcagatagagcgtaggcataccgttcatatcgcgtgttacgccaacggactcttgctcttcaatctctactcgatatctccaagcgttatagcacgcacggagagggctgttaccttcaggactgtcacgtttagcatcgacccggaaaagaagcatcttcttagctggaatctctacagttccgtccttattacctaggttgacgtaacggtcgccattgacaacattggcaagactttgctcacaccctaggaagtttctaccgtcttcagagtacaaccatttggtgatagtagactgagagcggattggcaactttttaataccgaatttgttgtcattgtacttcgatacagggtatccttcacgtcgcttaaacaccatttcatgtacggagaatccgtaggtgtagaagctagtaacctctttgatgaaggagtaccaactgtgctccatgtcatgcatgcactctttcaggaatttaccacgggccttcatagcctcgtcggggtcaactcctagatcaacttcccagtcaaccctgctcatcatcatttcgaagagatcaagagctgatttgatggtagggtcttctgccatcatttggaatgttctgcatgccctagggaaccgaagttctggtcggcgttcttccagaatagtaccattgacttgtttaaggcctgtactaccaatctcgcctaggcgaagtcgcgggatacccggtgctgtcttttcagtctcggccatcgccgcctcctattaatttagtttgaatttgttggattgagtcatatcaggcggtaggaaatcagggataatcaagctgccaagggatagagcattaaatgcatctgatgtagcgtcaacttggtcatctttgatagccttacttccgtcgaatcgctcaagttcatcgaagtaatcttcgttccaatctcccgcaacgacttgcactgatttagtttcagctacagatacgaacggggcgaatcgagtaactttcgatttgttagttgtcttcggtctggcgtggaatccatgatccgctaggtctctaattagctgggcagcataagctttaccagcagcccccgggtcacatgggatttgaatttcaacgtcttgaccgtcttgcttggctgtttctagaatgaggtcgaaaacacctccgaacaacctacgctctctgacaacatcctcgacagtgaacaagccttcttttgtacggctcatcagcacgccggctgtccagtcggggtttctgttggtttcggattcgatgctaccgctgatgtcccatgcacgtacccttttaagcacccgtagaggcgggtggggaacgatttggcaccagtcccttgtgaagtatccagctccctcttctctagcgtgccagctaccgtctaggagcttttcacgttctaccctaggaagggcttcaaggttagctacatactcagggtcgttgagcatcaagattgggttatcgaaacagttagccgcgatgaatttgaagctgataggcttcacctgatcttcatcgtcaggcgctagactgggattaccatgaagggcaatgcactcttccttggtgtctccccagaacatcttaccgcctttgcgtacaaaccagcgagttacgccggagcgctcagggatcgggattcctgtgtcagggtctagccaccattcaatccatttacgaaggaacgaattgtaatcagggttacatgtaatcttcatgtgcggaacaaccgagcatttcgggttacgcatacgagagataaggtatgtcaccatgccttctgtgaactgctgaccttcgtcgactaggaacttactaacctcccaaccttggaaggagtctttgtcagattcttgttcgaagtgtcgaaggaaaataactgcaccagaagagaacacaaacttgccgtctttgtctttccacttgactttagggtcaacgagcttgaataggtctgttgctttttcaagcagaccgcccgggcctttaatctgaggagtagtacgacgagtcattacacctcggaagttaggatcatggatatatttcatgaagtccattacaccgagataagacttaccagcaccagcagcaccaccgaatacagtgatctttgcatcgctgtctgtgaactctttctgtttgaaagattttggaccaataacatgagggctgagatcgaaattctctctggcctctttaatcgctagcgcgattggtccgagttttttatcaggaaccttagtgttttccatgctacaaccttatagagtgtgaaccctatcgggagcttgcgggttctttgatagtgaattggtgccccattcctgacttgaacagaattcgccgggttacaaagccggtgcatcaccataaatgcttaaagggcagggaatagagcctgtgagacgggaaaggaggaggaaaccgttcagcacaggcgaggaggaaagagtgtcatgttgtggaatcgaaccacctatcgctctgctgcgagagcccgctattctcgctttactggcttacgatccagagagcctaaagcgtcaacgcgatataccattgcacgacattggttggaggcggggactcgaaccccaacaatcgggtcacaaccgaaaggcagcatccgggctacacaatctccacacgaataatgccaagccggctgaaagcacatacggaggaatgttccggcttggacttgattggagcagttaccggggatcgaacccggaacaccagattgaaagtctggcgatttcaaccaattaatctataactgctttatttggtgcatctgcttggtaacgatccaagtcctctggaatttcaacccagcgcttctacctagttagcttcaaatgcattgtttggagcggatagacggactcgaaccgacgacgaactgcttggaaggcagacgctctaccaactgagctatacccgcttttattttacactagagacaccataagtctcgcttccttgagttcctgacgacgcctcaactccattacgtaattgggccgcgtacagcaaggacatttgtttcgtttgcgatgatactcagtcttcgctggacatacacgcgatttgatcttcactatgtactcctaattggtcaccccggaaggatttgaaccttcgaccttctgattccaaatcagacactctaaccagactgagctacgaggagataataaggcccgtatcgggcgttcgactctgcttctaaagcgaagagtctcttttggaaattggctgggacggcagggttcgaacctgcgacctgagagttaacagctccctgctctaccaactgagctacatcccaatataaaccttggagccgcgtatcggatttgaaccgatgtgagacggatttgcaatccgccgcctaaacctctcggccaacgcgggctaaattcatgaggttgttaacccgggcccctccgggagatactggatcacctcctatggcttacagcatctaattcaaatctaggagctataacgggcccgagccggacgatttatactggctgccagtagcttatcacagctactcaattacccgtgccagcttaggcgcttccccttaccgagataggtagcgacactgaacccaccacttagggttcctcggagtgcaatttggtagcgagaggtggaatcgaaccacttgtgttcggttatgagccgagtgacagcgccagccagtcttaacgctctcgctatttggtggtcgaaggaaggaattgaacctctagcctatggcgtccgggttacagccggatgatagtagccatctatctctacaacgaccttgttggcgacccatgtcggattcgaaccgacgaccttgccctagacaggggcttgctctagtccagactgagctaatgggcctgtaaattctggtagccagagaaggacttgaaccttcaaccatccgattatcggtcgggtgctctaccaattgagctatccggctatattgtttgttactctatgtacctatattatcatgaatttcttgtttgtcaacccccttcatgataacttttatagcgccggggaggtctgaaagcagcgctaccttcgtcagtcccctagctctctcactacttggccgccatagaccggccttaagtgaccgggtagggactcgaaccctaaccaaatagcaaaagagattcttaatttggtggccccggagggacttgaaccctcaatcctctcggcgtcagtttctaagactgatgtgtataccaattccaccacagggccttaatttggcagcgagtaaaggagtcgaaccctcaccgttcatcacagcggcctagttttctagactagttcccgacctactcagggctactcgctaagtatttcttcatctgataagtgtattaaaacatgaaaaattcagtttgtcaacacttaaaatcacttattttggcagtgattttggcagtgagcagtggtctcgatccacatccgcgttagcagacgtactccttagcagggagcctcagaacctatctgatttactcactaaatttggttggacgggtgagactcgaactcactataagtctggttaaaagccagatgctgatccactttagcttccgtccatcttaaatttggcgctcgtactaggactcgaacctagaccttacggcttagaagaccgttgtgcatccattacactatacgagcaatttgtgtcactatacaggagccttactctcctgtcaacaccaattggagagaataccgagtctctaaagaacatcggtcgctagcagcatagcctagctctccggctgcgaacttggtcccagaaggattcaagttccatataatttggcgggccgactccgattcgaacagagaatacgaggatttggaatccagtaggttgccaattacgctcaccgacccttaattctggaggacatttcttactcgctgtcctctgagcgagacacattccttgtcgggtgaatgttcttttaccacatttggtagccactgatggaattgaaccatcatctccagattcaaagtctggcgtcctaccattgaacgaagcggcaattaatcaaaacgcgagaactactccgggagccttgtcctcttcagtgttctcattatctcctgattctgttccttttgcaagctcttttttgagtgcaatgtcagctttgtagtaagcgacgaacatatcagaaagctctttcttgagcttgattctcatttgtagagaaacctcaggattgtcagattgctcttgtaggaacctaatgttctctgcaaagctcttctttagaagtctgagtcctgcttttaggtctgtttgaatgataccccgggcttctagctcggcattcgtagggcgaccgcccttgtttctttcttgagtcatattaaatcctctgaagctttgtaagccccatatactccgattatagcacgaaatctcctgttgtcaagcccttaaagaattattcgcaccgtaatctattatttatatgtattgtcagagtacgcgcactctatatacaatgtcagtccccggtagggagaggagcggtaactccttcgcttggataccaaccaccaaaatactcatgatccagtgtaggattgagagcaaacctacggcaagaggagcatagatcgtcttccttaccagtatgtttattgatgactggagtctcaaacgagagttcgctatcacagcacttacatctcatagaaattccttatgggttgattgatggattatctgtggtgggtatctggtgtatgtgtatcaggagaacaccccatgcagatagattcggctagggaaggatagagtcgtcccaaggctcgccatacagaatttaatctgcctaagacgtgccttggctctatccaattcctcttactcatgcagatgagttcggtgaggggcagcatgtaggctgcatcggattgctgtcattccgctttcgcgtcgtctccaccctttaacagcattcgagttcaggttgcccttgtggattcctcttcataggcgctaggcgtgggccggtgagtgctttcagacatatctctcccacgctgaatattgataataccacagatttcctctatgtcaagcctttaccagaacaaaatgggttgacattcctgagaaacgtggtattattgtaaaacactaacccgcaaggagtaaaaagaatatgcaagttatcaatatcgtagaatacaaccctatcgtctggcttcgctcgattcacgcccacatgaaggaaggtttccgtgtcgttcggtcgattgaaggctatcctgtgtacggtaccctctgtcaagtgcagatgttccggcaggaaggcgtcagccctgagattgaaaaagagcttgacggcaatgaggtcattgtgcaagaatgggacgttttcagccttctgatgggcatgcaaaatgctttcgatcaaggtttccgcattgatctcgaagaccctcatttcgccaatatgaatttcgctctcaagtctgtaaagatggtccgagaaggcgcagagaagcagactgaggaaaagtctacagaagtagctaaggaagttcctgtagaggaagtccaagagactgaatcggaagataaaccaaaaacccgtcgtcgtcgtactacaaaggagaaaagtgaatgaagtttaacaaagcacaacgtgagtttttcaaagactacgcaatccagactgtgaagtctaccctgatgcaggttgcagcccagaacggcctagagatcaatcaggaagctctggatcgcgctatggaagtcgtaaacctcgaacctctggcggaagcagccgggactgcgttcttggaacgagtagactttaaaaccctcgtcaaggttgacaagtttgtacgcactgaagagttcctgagtgtagctcaggctggtgcagaagttggtgaagctgtcagcggagagctgagcacaatcctccttccattctttgcaatgctgggctctggccagaaagaaagcgaggagtgattcagtaataagggccctttcgggcccatttttgtaaaggaggtattatgcctgtttcatgtacacaaagtgttagcaatcgttactccatccttctgccatacgtaatcaagagcctcgaagaactcacagaggagctttggacccttgaaaatgcaggtcagaatgatgaagtgtacatcaccattaacggatgcggtggacaggtagagaccgccaacgctataatccgagcgatcaaggagtgtcaagctccagtgcatgctcgtctcgaaggtgagtgtgcgtctgccatgactgccatcgcgctagcctgcgactccgttgagatcgaccagttcacatatttcatgatccacgcgccttcttttggcgttgtatctgctgatttcaggaatagtctgaggaatgcagcgtttagctcagcgtggtgcgataaatgggtagatcacgtctacagtgacttcttgactgagaaggagctagagcgtgtcaaggcaggggaagagctttacattggtggcgaagagctagaagataagctcagtgacttctttgaaaagaaacgccttgcaatggaagaaatttcagagtagtatcatcaggccgggacagtagtcgccggccattttttcggccaaaggaggatatacaagatgttcgaacttatgcaggagttggagggtcaggctattgacaacagtaaagaaggcgtgtaccttcagaagatcagaaaggagtggaaatatgttgaggattacatccatgctctggaggaactggcgctgtcggttatgccttccgagctgctaaaagagattcaggaggattgcggagtatgagagacgagtttgaagcgtggttcgtgcgtaactacgcggcccaaattaaggatgggcaccatggcttcacccttgatcgatatgagcatccgccgcatcaatacatccacgacacaccacatcatgactggcggatatggctcgccagccgcgcggctctgagggtggagttgccggagaaaatggagcccacaagaaacatctacggcaacctgataatcggcagctacaacgcagtgcttgatgccgtgaaagaagccctccagcaagccggaatcgaggtgaagtgaatggcgacgcgaacagttcactacgacgagtgggacggcggcacagaagcggacagtgaagaaccgtatgacgtcttctgtggcaccgatggcgacttcgaggagaagaacttctcccgctaccgcaatcatatcacctgcaaacgatgccttaagttgctggacaagaagaaggaggctgcctaatggacaccaacaagctgaaggaggattactaggtatgaatagtgtatgggtgatatttggacaactctgggacgactacagtggagagttcgatctccacatgcttggggtactgggcaataccaaagcggagactatccgcagggttgtatcgtcctacccgggcttgccagaaccagacgaggagcttcttgatttcatcgtagcgggcctgattgtaaacgcagagtgtgaagtagacattccgtgcgggaagacaggaaaagacgagtgggttatgtattctattcgtaagaaggaggtgtaccaatgagtaacctagtgtgggaacttgtatgggaagaagattacgagcctgacagtagaatgggtctgtggattgggaaccctccgagtgtagagcagttagctgaagtactcctaggtgcggactggagactgacagaggacaaagtagaggaggccgctcgtagccttctgaagagcggtggttacaaagtgtctcaataccactggctcaaccttgacagtttctttgcagatgatggcctaggggaggaggtagaaattgacagcgaagaaccctgatctttcaactcagatgattgataaaatcattgcaaaagagtcggtagtgggacagtatacagtggctaagcagaaggtgaccgtgattgactatgaagagttttcacgtctggacttccagcccccggccacttggttcatcaaggatgcatctggctactacatctttgtccacacgtctcagcgagctaaggctcaagcgtggatagacgaagagtatggcaaaggacgttacaccgtcaatgccagccgagtgcagaagaaacacaacacgggcgaggggagcaagccagcttacggcgtagccactcgtcgcggacagaagcgataggaggaaatatgaaagtagtaaaacgtaaaggtcacaagttggagttggagagcgacgagatcaatatgctggtaggacttcttggtcacctctcggcttcggctgcgaccacggacttgggttggtttatggaagacctctaccaagagcttgaggttaaaagtgatccggaggcggtgaataaatacgagcaggagtttcgggcaaaggcctacggcagtgatgatccctcggacttcgttattttaatcaagggtgcagatggagagtacaaatgaaggacgtagcaggaagggatatcgagatcggcgacgcagtagcattctgcctaggcggaactggaatggttatgctggtaggcgaggtggttgcaatcaatcctaagactgtcagtgttaaagctgaagcgtgggacaagtggagcggaaagccatcagtgcaagtgttccttcgccggggcgatgccgtttgtaaagtagaaaactaaggaggagatatgactgaaccgactgaacccactgtaatgcgcatagacgatgtgatcgaggctctacagactcttcgcactgtgtatggcaacttgaaggtagcggagattgaacacggagacccgacttggagctattacccgcctagcgttgtctatttgacagacactgacgagtactacatggaattcgcgtgccctgaagaggggtactacgaggagatcgcggttctaattggaggctagtcgtgaaggtcaagcatattaaagcttacatggaggccgctgaggccttcgctaagtgcagcgactcgactcgttccaaggttggtgcagttctagtaaaacgtaaccgtatcatcagttgcgggtataatgcccttccagagcacctaaacgggccgctggaggacgaaacgggagtaaccaaggcagaggtgaggcatgccgaagaaaacgcactgagggctcttatacgcagccctgagagtgcccaaggggctaccctgttcgtcactcactcttgctgtaaaaattgtgctatctcggtggttgaagctgggatcaaagtagtgtactataagcacgaatatcggctcgacgaaggtcttaggcacctacgggagaatgatgttcttgtcatcaaatacgaggaggatcaatgagttattttcaacgactgtatggactcgacaagaaaggcgggttcaaggagtggactgtagaggtggccggagaggaagacggtagcttcaatatcgtcgtgaaatacggcaaagaacatggagccatgacctctcaggttaccaacatccgtgcgggcaagcagaaacgctctgtagaggagcaggccgtgtctgaggctcagtccaaggtgagcaagcagttggacaagggttatcgtgcaaccaaggaagaactcaacgatctgccggtaatggctatgctcgccaagccgctcgatcctgcgaagtataaagcaggctatggttctcctaagctggacggtctgcgatgcatggctaagaaggtcggcggcaaggtgacgctagcgtctcgtatgggcaagccttacaacgtaccgcacatcatcaaagaactcgaagagatcatgcaagagggtgatgtgtgggacggcgaactgtacgtccacggtgaggtgctggaggatatcaactcggcggtcaagcgagaggatgcttacgataagtggatgaaggccgagaaagctcttgaagcttaccctctagagaacggagaggaggagtatgatcgtctcctgaaggaagtggacagcacgtcctttatttacggtcttcgtaagcggatggagttccatgtcttcgatatcgtaaaagatgccttgacatttaaggagcgtctggtagacttccagttccagtctgcactacacagtggtctggggagcattcgttttgttgagtacgtattctgctccacctttgaagaactgaaacgtcttcatgatgtgtaccgtcagaacggttatgagggtatcatgtggcgcagcccagagggcttgtacgaatctggtaagcgctccagcggtctccagaagtacaaagagttcttcgatatggaaatgcagatcgtgaactacgtggttgacaagaatggaaacgctgttctggtggtgttcgaccctgtacctcaagagatgcttgaggtgacgtatggcgactttgaagcccgtaaagaccagatcactaattttgagaactaccggggtaagtggctgactgtgcaaattcaaagtcgtttcaaaaagaccttgcgtgctcagttcccaactggtaaactaattcgcgctggccgggtaatcggcggtgtatttgtccctgaagaataaggaggatatagaatgttcaacgctaagtctgtcaatgtgaccactgcaatcgaatctgctgagaaattccagctcttggatacttctgctatccagattcgaagtgtcattcagttcatggatgctctcacttacaaattcaattacatgactgggtgttttgaaactgaaacccggggagcgaagcacatcagtaagctgagtttcaacactgcggtgcgtctgcacaacctgtaccttgtacctacatcgacggtgacccagtacggcttctgggccccggctggtgccgggtatcggagtgcagaattcatcgatctggttgtaagtccagagcttatggcaaaggcgcaggctagtaagattgtgaaaaatgccaaaatccagaaggatcgtaaaggcaacattcacattcagtcgatgatggtcgagttccccaacaaagactacgcccgtcgttacaacttgggctgaagtataatagccgagtgatatacagcccgcccacaaggcgggcttctttgtctaaggaggtgttatggaaaccttagaagctctcgttttgtcgatccttctagccttcattgggatgttcctcgacatggaatactctcgtctaaaatacggcacggagcctgtagtggaattccaagccagtcccggtcaaatcatagaaagcaagcgcaccttgtgtgagtacagaaagccttgcaggttgttggctgaagctgtatacttcgaggcccggggagaaccggagatcggtcagattgctgtagctcataccgtagtgaacagaatgaagcacgacaggtggccgagcacagtagccggagtgctctacttcaagtgccagtattcctacacctgcgatgggagtatgcggcaaggtgtcaaggagcttgacaagtgggaggcagcgaaacatgttgcatacaacgccctatatgggtatactgtcgatccaacgagaggagccgatcactacctcaacgagaggaaggtgagacgggctaataatggcaagcttcctcggtgggctaggaaatacaagcgcacaatcaagataggcaaccacacattctacaaaggagactaatatgaacactcagcttggtatcgctattgagatcgcactctcggctcacgaaggtcagcggtacggagagaccaacttcccgtatgcttaccatctgaatcaggtgcatacagtctgcgtggcccgcaacgctcctaaagatatggacccgggtcaggctttctccgaccttccgtacatggacactcttctcgctgtgtgcttcctgcacgacgttctggaggatacagagttgacagaggaagacttggagtccatgggcgtgatgcctcacatcgtagaggctttggtcattctcgataagaaccgtgctgagagctaccgtaagtatatcgaagcttgccgtaatcatccggttgcaagagaagtgaaaatttgcgatactatcgcaaatcttacaaattctgtgatgagtggtaactcgaagcggatcaagaagtatagcaaccaactgagcatgctcgaaagggaggcatcagttctggaaaacaaggcacggaagaagacaactcgttccgacaaattcaaaggctatgtaggagaacagtacagtgtggaatgaatataaagaacagtacagctacaccccggtcaccaccgaggagattaaagaagttcttgcaagatgggagttcattaaattgcaggctgagtcggctgtagaggaagccatcaacaactattctcgtccttactctttcttcgagaagttgcggggtgtagacaagtggtctccgaaagagctactgaagagagatgcagtggatcgctggctgggtgtcgaagggcatctgtaccgagagggtaagattagtgcggaccattactgggtagtagatttccactacgagcgtcgggatatgttatcagagttcaaggctatggctagtatggagccggagcgtgaacatctgctgggaggggccgctatgcgactcatccgcaggattaacaaaatttacgaatttgaaatggaggcataatgtctgtatttttctcttccgatctacacttcttccataagaatgtgatcgagtattgcaaaaggccgtggacttttgaggagcaaaccgaggagcttatttctcggtggaactcccgggtaggcctttttgacgaagtgtaccatctgggagacttcgcatttgcaggaaagaacaagctacagcctgtgctggatatcatcaagcagttgaatggccgtatcaccttcctgaagggaaatcattgcgactctcgtctgtggaagttgatcgctgatagcaatctctctcacgtagaagacattcgtgagtacaaggagattcgaattgacggagttaagatcgtcatgtgccactatcctttcgagacgtggaatactgcccatcatggagcttggcacctgcacggccacactcacggcagcctgccttccaagggtaagcgccttgatgtaggtattgacaatcacccagatcatcaggtattctcttacgacgaagtgagggaatatatgcgagagcaagagtttgtggttgtagaccaccataaataaaaggaggaaagaatggtcaatgtgttgatttcgcgtgacaaggaggatgttaaacctaaagctaacactctggtggaactgatccatgacgacggagttccttttatcgtcctcatgacttctgatgttaaacaagacgggacttttgaaggagtggctttcgaggacgcccgctggacggatcagtttgagatcgctcaattccgagtattcgatggcaaagtaacgctgagcaataaggaggactaacatgaatgatccggtcaaggatttcaagaaaactgtaatggttgttgctgcacactacatcactcagtctgggctgactcaacgggaagtggcagagcggtgtggaacccatcagagccgaatctccaatctgatgaagcagcatgttgacaaattctctattgagagtatactggagatcgttcacaagctcggaggttataagatggtagcctccatggaacttgaagagcataacgtacttaacttcaacatcttcccggaggaacaagcatgaagattgataagaattcgtggcatatgcggctccatcgtacgttcgagaccccggtctattcggctatctcaagcggttggcaaattgtaaccctctgctcttatttctggcagacagtattcctcgtcgtgtggctggcgttaacggttgtagcgctcgctgctgttgtaggctctgtattgtattctctggctctcggtccacttaccggatatgttctaggtgggactctggctgtcatggggtttgtatggattggaatcatcgccgtcttttatggcgtgtgggttttctaccgattctctcgctttatgtcgagtaaatcgtccagcaaggatgggattctggtatcgtatctaaaggcaaagaaggctaaattctgcccaattgtcgaattgaaataaggagaagtaggatggaaggtaatctcaacattgcaatgtacaaagacctgatcgctaataagctggtgactgttaagcacttcaacggtatgtcgattataaagtatgcccggaaggtgttctacgagaacctgtggaatgagcatccgctccttctggaggcacggggtcatgtatttgacccgcactccggtgattgtattgtacgccccttcgagaaggtgtttaatctgggagagaatggtgctgggagtttcctccatcctaaattccgtgtgcggctgattgagaaagtgaatggattcatgttctccgtgactaagcacaatggctcccttatcttcagtactacggggtcattgaccggcgattacgttgcccttggtcagaagtatgtgtcgaataacccagatgattacatcgcaggcttcacatataacttcgagatatgctctccagacgaccctcacattgtcgaggaagaagaaggggcatatttgatcggtatccgcgatatcttcactgggggccagctttcagaatatattcttgactctcacgccctaggtgtaacggaccacagttctgtaaagattcttcgtccagagcacatagagtgtagctgggaacatgcaaagggtcttctgagttcttgtgagaaagaaggttacatggtacaaacagggctagggacagtgaagtgcaagtcaactcactacctcggcaagaagtttatcatgaggatgggtagtaagaaggtcaatgcgatgtaccaagacccggctggattcaagcagacgcttgacgaagagttctatcctctggtagacttcttggtaaatgaagtggatgaggctcggttctcagaaatgaccgatgcacagcgacgacttctgatcgaaacctacttcgatatggctcgaatttaaaggaggaagtatgcaagaaaagatcgtgtatatcattcgaggactcccgggctccgggaagtcctctcttgccgagattctgtataacaaaacttgggagtcaggccggcaggcgtctatctgcgaagcggacgattaccaaatggagttcggcaagtatgtgtggaaagctgagagggtagttgaatctcacaaaaagtgcatggacaaagcgcgacggtctatggagataggactagatgcggttatcgtatccaatactagtacccgggagcgagaggtagcaccatacattgacatggctgaagagtttggctacactgttatctctctgattgtagagaatcgtcatgggaataagtctgtacacgatgttcccgagagcacgatggaagcaatgcggaatcgcttctctgtgaaactgtgaggaggatgtatgattagttatgctgtaggttgccttcaggaaatggaaggtgttatgagccgtccgtggcaagaggcaaaagtgtggacgttcccgggcggcgaagtgggcgttaatgtgggcggcatcgaaagccatgcgttcgtaaacgttaaagctcagattcagaatagtgatgatatcatggctcttctcaacgtcaccgaggcgatccgagcagaaatgattaatccgcacatgactcttctgctgggttatgtcccgtatgctcgccaagaccgtcggtgcaatccgggcgacgccttcagtttgaaagtgtttgcaaacatgctgaactctgccggatatgaccgagttatcgttgtggaccctcacagcgacgcaactctgcacctgattaacaacgtcgaagttgtccgtcaatcttcggtcttcggtggcctactgagccgttcagagtgggagcaatatcaactcgtagcccctgatatcggagcaacaaagcggaccgaggattttgcaaagaaggccggagcagccgctgtaattcgttgcaataagaagcgcgatctccagaccggtaaaatcgaaggctttgaaattctgaatccttcggatatcgatcctgaacttccgcttctggtgatcgacgatatctgtgacggaggtgctacattccgaagcgtgtctaaggccctaagagagtacagtaaagtgctccctgacctgttcgtcactcatggaatcttcagtaagggtatcgactgcttgctggattccttcggatgcatctacacctcggatacgctccctcaaaaagagcacgaagcgctgactgtcattccggttgaatactccaaggcggaacgcctgtgagcttgagtatctggattgtagagtataagcgttcggctccagagaagagggttgtcaaggtggaggagttcgacaccaaggaggaactggacgctcggtacaagacgatgcacgataagttttgggaagacttccacagcaagaagcaaccattgctgcgccttccatgcatctaccctgtgctgacgctgccagtagaagaagtcgaatattgacaggaggcccagattgatgtagtctgggcctattcaacacaacaggaggaaataacatgaaaattctgccgcatctttccactgatgggtacaagattggacacggctccatgtactcggaaggaactcagcttgtctatagcaacctgacccctcgctccgataagatttatcgaaagacgcatgccaccgacttctacgacggcactctcaagtgggtcggcggacgggccgcttggatggagatcgtagagtcttgggaaggcttcttcgcggctgaagaagagaacgccgttggccggtattcccggttcctgactggctattttggccgggaaatggaagccgtggagcagcttcgcgcccttcacaagctcggctatctgcctctggaggttaagtctttgaccgagggcgttagcgttcctatgggcgtgcctgtgctaactatcaagaataccctgcctgagttctactggctggtgaactaccatgagaccctgatttcggctatgacttggaagaccgcaaccaacgcaaccattgccgcagaatacgcagctatgggccggtactacgcgaaccacactgggtgctacgacgacttcctgctgtccgttcagtttcacgacttcagtgcccggggtatgagtgggattgaagacgcggcccgaagcggtgttggtcacttgacctcgttcgtaggctcggacaccttggcagcggctatctacgccgaggactactatagcgcgactggtctggtagcttgctccgtacctgcgactgaacacgctgtagctactagcaacatcctccgtattgagaaagaaatgcaggatggggaaggtgaaggtggccgtgaggaagcagaacgtcgattccttatcgaactgatgggtaagttcccgagtggtattctgtcgtacgtggcagacagcttcgacttctggggcgtgcttactgaaattctgccgtccatcaaggatcagatcatggagcgtgatggcaagctggttattcgtccagactctggtgatcctgtagaggttatctgcggactgggtgatattgaagttgtcgagtcgctcgaacactgggatatcatggatgcagtaaatggaaacgatgcatttgttctgaactttgaagataagtacttcaaggttattcccactgagtgggatcaatacgagtatgtaattggctacaaactcgaagaagtgagcgaggcgcaggtaaaaggagctatccaagttctgtgggaaaccttcggcggtactgtgaatgaagcaggttataagatgctcgattctcatatcggtttgatctatggggattccattacgactcgccgagcagctaaaatcttggagcgcttgaaggagaaaggtttcgcttccctgaacgtagtgtttggagttggcagttacacttaccagtgcaacacccgggatactttcggattcgcagtgaaagctacctacacggaagtgaacggtgaaggcattgcaatcttcaaagacccgaaaactgacagcaagaagaagtcggctaaaggtctcctgaaagtgtaccgagacctgcaaaatgggcgattcctccagttgaaagataatgtatctgaagaggaggaggctactggttccttgcggacgttcttcaaagacgggaaatgggacacggaagatttgaagaacaatgatctggaatctatccgttatcggattaagaacggcgtataagaggaggtgagtatgttggctaaatactattttacaaccttctgcgagcaaggccgaccagagaataaaggacatagattgttcaagtttaaaatctgggagaaagggtactggtctccattcgcagcattagactcgatgtacgataacatcagagccgatgcgagaggtttggatatcagatacacaagtgtagagaggttcaaatgattaaataccgaaagggcgacctgctcgccgcgttcaaaaacaaagagttgcacgctattgcacatcaggctaattgcttcaacaccatgggcagcggcattgctaagcaaatccgggagcaattcccggaggcctacgaggcagaccaagcaacggtgaaaggggaccgaggtaaactcggctccctgaccttcacaatgaacgagtacggatcgatttataatctgtacggacagtacaactatggccgagaagagggtcgagtctacactcagcttgacgcactgggccaagccttgtacactatgtctctgttccttgaggcagaggctgacgctcgggcgattcctacctcggagttgtgtgtaggtctgccgaagattggctgcggtttagccggagaggactggagcaatgtcgagcctcttatcgaggagacgctcggccagtttcaggtatacgtttacgaactgtaataggaggagatatgatccggggtgcaattaagtataaggggacttggttggccccgggctcggaggctttccagctttatcaggataaaaagctagataagctggataagcatctagctaagctggacaaggaattcaaaaagctagaagggagagagtgacatgtctattgatctggacaacttaacagcgtacgaacttctccatttgcaagctcaaataatcgagaaattgagactcaagtttgaagagtctggagaaggtgagctagagataaaagacgtgtaccggggaatgctcttaaccatgagcagcgatggatacactgttcccagaggatgtgaatgcaaggtggtgagtatagactacgaagacaacttctatccggtgttagtggagtacaccaaccaagaatgggattatcgtcaccactgggttacatacggagaactgggacaaatggtgagacgatgagatattatacaggagtcggaagtagagatacgcctaacaaggagtggggcattctcagagagctaggtcgtaaactagcggaacgaggttttattcttcggtcaggaggagcgaagggagcggattcagcgttcgaggcaggctggctggattatatatccaataacaaaggagggactacggcagaaatctatctgccggagcccgggttcaatcagtatgtgataactgagactctaggagctacaatccttccagaagagtggccggagcagtgggaggaagctgggagtattgctagccggatacacccagcttggaactctgtcagaaatgatggagagcctgttctgagtccattcgcaagacgagcccacactcggaacgttttccaagtgctgggaatcgatctcaacacgcctagcaagttcttggtgtgctggagcaagacagaccacaacgggattccagaaggcgggactaggaccgcttggcaactggcgtcctctagaggcgtgccttgcttcaatctgtaccgccatgcagacagagacagaatcatggcgttcttgtaaaacaaatagaggtacaatcatgtatacagttgaggttccagaggttccggtagtctgcgatatcacagacccaaaccgcaggtgcatgcaatggattcgcgctcgaatcatccgacttaagaacaaccagagtacagggttcgaagacatttacgttctagagcccagtcacgttgatctagagtgcagatggcgagaagagaacgaccctgaagattacgtcagatgggtcgtggcgtggttcgacgtggatatgtgcgacgggcagaagttccgccagttgattcgatacgatatcaacaacatgttcaagtggtatggacctgctaacctgacatgcgaaggcgtgttcactatcgagaaatctaaggtgtgccctccgtatgttgacatgtgaagagatcgaggagctaaagtctcggataggggcgaatgctgatcggttgattcacaaggtggagagggggcttgttcctcctctagataccagcagagggcgaaagccctctttctttttcaacgctgttcagcctgaaatgtacgaagtcatggtcgagcttgatggagactaccctctgtgggtggacgacgttctccaaggagtggccagacttgattggtacagacctgacgaaaggtcaatccccctctctgcaaagaagctcttgacaatttttgcaagtcttagtaatatcaacgctcacacgataagccacctccttcgagtggaggcaagacaggctaatcgctactacaaggctgcggaattcgcacatgagaaattgattgacgggttctgcaaagatgagctaagatgcatgaagtatccagagacattcgtctaccccaagccggatgttccccagacagaccaagaggagggttagtatgttcaagaaactcgtagctattgcgtttacactcgccctgcattcgtgcggggtcgctcctgcttatgcagaggacacttctggccgcgatgcagaatactgctcggctgtagttgcacacttgacaagcatgccaatggaggctatgctctctgctctggatgttcgtcccggggatgatcctgttatccgagtagcaaacaccatgtatatctatacatgcaaggtggagggcaatctggtgctggtcaagggagactttgagaaaggcttctatcgtgcgttcctcgtccaagaggacgaatacaattactacatcagccgggaggaaatgctgtgatcttcgacaagtatattatcgcgttagatacgttcaaggatgggactgaggaatacgccctgtttagccggggcgacaacgggtttataacgtacatcaacagcttcgcaaccaaatacgcagctattgaccatgcgttcttcttggagtacaatcgctacccatcggcttacgaggaggctgacctgtacaactgggttgtgatgtgttgaccgcaggtcgaaccaaaaatttagagccctagtggggctctcaaaggaggaaaacaatgaactctaattctattgcacctctaatcaaggagggcatgcgggcattcttcgagaacgaagaggaaccatacatgtgctacattctggagagattggcactgtgcagtgactccagcgtcaccgtctcagacgtgggacgatttaaggggtggctagataagacctttggaatcgggccgcttaactcggtaatgcacctcttggacgaagtagctgattcatgcgtgttatccatgttcgagaataaccctccgaacaaggactgggaagactattgggaaggctgggccataggcagagcgtggtgcaacttctacgtgtgggcctacttcgacttgattcgaaaaggaggggagtaatggagataatcccaatgctattcgtcctctcgctcgcgtggggaattgtgttcatgtggacctacatgggtatcacggagtatttcaaagataacttcccagctagtgcgactaaagatcacagagagggtatcgaggcttttgccattgtactgggactgctatggcctattacatacacagtgtatgctagctttctgctactctacgcaacatacagcgttttgaaagtggtgttgttacctaagtgggctctgtctatctggaacagccgtaaactacttaagaggatcgcaccatggaacaagtagggcttctcattctcgtatgcatagtcgtcggagtggtctgcctattgttctactctgtgatagggatgttcgtatgggaatctctacgaccccttcttgggtggaggggagaaagtacggagaggcgtaagaaagaggcccgagcggtgttagctggaatattctggcctatcgccgtaccgtttatggctatgctattcctcgttagtctccctagaaaagtgtggagactgactagggtagctatcacaggagaggaggactgaatatgtttaagaagctgttcgcatggttccgagaggaagaaagtaacgatgagcctaaagtgttggagtctcgggctgaggagtttcaggtagaggagtgctatgatccagcctcccggcctgtaaagtatataaacgctaagcagattaaacgtctgaaggaactggatgctaaggtcggagacccggttaaggctatttgtgctacattcttcgactggaagcgatggatcgtagaccgcaactggagattttcgatgatggcccaccgtatcgatgagaaggtgcatattacagattctaagaccggaacagtgctacagtggagagctaccgcagactcagacctgataccggtaggattcctatggagagatatccccttggtcagggacgccgctgacctcgtactgaccaatatgccgtggatgacttcggaggaaaaagaatacgctgcccttatggctaggaaggctatcgccgctttggcagataagaaggactacatcgacaagctggtagcccgcaagcgtagccgggataactacaaggctggtctgattgaccgtgcgttgatgatggagaagtatgtaggagtccaagaaggcgatgagtgggatatcattctaaaagaggctagagagcgtctggaacggtctatccccacagagagcttgacaatggactgggaacgttttacactcccataaaacacagacaggaggaatgaaattgaaagagcgtttggtgaagttttacactattgtgaagacccccgaagagaacattgcagtacaacagcaccttaaggcttatggtatcgagtttgggagcggaaacggcttcatgtacgacaaggctcaagtgctactgtgggttggagataatctgctggactacactcgtaaaagcgacggaagtccaatgacattcctgtggtacgaggaagaactcaaagaggccattggatactcgaaatcgacctacgacttccgaagggtagacttccatttcgtcactgagaagaaagtgaccgcgtacacgcttcatgagtgtgacactggtcctactacagagctaaatggcacctacacgcttcaagcgttgaaggaaatcattgcagacatggaggaagagaatgaaaactaaagagatcgatgtcagcaatttcactgccgaacagtttgatgcgttccttgagtactgtcagtacgctcaattgaaggtaggagagggcgtcgttgataagatcagggagtggatggaacaccctatctccgtagatgggccagacgatagtccccggtgcctgtacatccgggatcattccgaagaccggttcattagctacggaacaggcctgcgaagcaagtggcaacccgatatgtacgccttgtacaggcctaccttccagactaagtgtgtgatgactctaggagaggcagataagtatgtcatcgtgggcggtaagcccctctcactggatgagctacaagcaaccctagccaagcaaggcgtgatcgtaacgttcgggagggtctaatgtctgagcaatattggtatccagcccctatcgggtgcataaagagtctgaaagcagtggcttgggaggcttggtccagagacttctgggatgatgagaatttgaacaagattctccgtcacaacgggttcagtcctgaccagagcaaagaacgagcgttgcagtacatggaccagattaacgaagagtactgcaaggttatgcagggatgcttggaagcagaggacatggaatacaatcagtagagacaaaaagccccgggcagcttttgctgcccggggctctcttttacacagttacggtctagctgttgtcagcttattcccaataccaatcctatagatttgcattggccattctccctgtgcaagcggagcttgctattgtatgcacgaccccaatccccctcccagaaataatgaccacttgaagagtgcgtttactctatggctgggaaaataatgatgtagtgtggccctacgtccgagtgtatcctgttcgggagttgtggttctatttccgagctacttaaccacgaacccactgtcctctcctaacccctagtaaattcaaaataatgggtggccgtggtctttccttcttagcgacagctaagctatgcaaaactaatgccaacgggctcccgccctgccgggtgaaatctttccacatgttggcatggaatatgcatatacgtttgatagcttcgctatcggagttcccgcacaagagttctcgcactctcgaagggttgaccatcgaccccatcaaatcattgcaaaagggttgtctctcttccctgtgcaatatccttgccaagtttgtccactctctcaagcaacgcttgaacaacgttcacactgtgaacatcctccatctgatagagatcaatacattcatggatggctgctatcttggcatgttgccatgccgcatgggcttgcatcggatcgtcgaacgatccaagggtagactgctttccaagtgtcctacactgagcaacgtatacaggcatcccgtacttgtcatagcgtgctaggcggacgcctagagggatatagctatcccacgtattggcacggttattgcttgtcttgtcacagttggtgaagagtgtatgcatgtatgtaggcgtgaactcgcacgtatgcggagcatagagcttgtttcccgggaagaggatattcttatctaggcggtagcctacggcgtaccctgacacattcaccacccaatcatagaacgcttcaaagcctgtcttgggcttggcccattccttgcatatctcatcgcctgcgatgacacgtttacgcatggcgtagtagatttgcttagcgtaatggatgtgaatcttggcatgattgttgcttgtcattgtgcctccttgtgtgaatgttggttactcgatagcggcagctatcaaccttttagtttaacgtatttactgggctagagtcaatgttttcagtgtcaccacttccggtcgcaatatactaaagggtagagcctacacttcacagaccactttgaaagctccgctttcgagggttacccttgtcatgcttatgcaattcgtgtgccatgcaaaacaggatagcggagctatcacagggtatactatagcatgcatccgcatgcaaagtgaagtcacttctgaggcgcatgatgaactgtacgcaattctcattgcaaaatgagaacggatgtaagctgtcgcttaacacaatcgagacaatggtagcgcggaaaggggttatacccaaaatctacctaaaacaaccaacatcctatgctaatcgcatatgcctctaaaacctcctacaagcctcatactgtaaggctttcgccttgacggtgcagactaacatagcgaagctatcgcttcatctacggcctatcaggccgctttaaaccggtaggttttaggtgggttattgtggggttatttgatagggtaaactgaacagaatgtgaacgtacagcttccgctgtcatgctgttatacatgtaacgttaacgttacaagtggtctatcttgtcatgctggtgttaccctctacagggtgttacaacattacatgttaattacacttgaaagctccgctttcgcagatagaacaaagcccgcacaaggcgggctgagcgattatgcgttgtattggcgatggcggtgccattcggaccaaaatttcttttcagtggtcaggcctgcaatgtcgtggtctttccaacctccaccacgtttcccgtctgcgaaaaacaatcggtagttgtctccctctacagcgtcgatttttgcaaacccgattagcttcacgtccacaaattgaccggctttgaatttcatcgtctctccttgattgcgagattagacccgcaatggccgcaccacttcttacccaatgcgatcacccaattgtgtttgctgttaccgccgttgatggctccacacttagagcaacagatttgaacgtttttcatggtctttcctcggcgcgctcggcggcacgttccacgttacggtcatgcgccatacgtgcccatactgcggaccaacgcattttatcggcagcgttgggcttgtacacgtcatcagggtgcggtggagggccataggcgttacagctttcgtcgtattcgtagtccatgttctttcctatgagaggccccggtcacccggggcttgttacggattgattacttgcggtatttcttaatcaagtcgtgggccatggcgatagcatcagagtaggtttcgccgccagcttgcatttccttgacagccttattgcgaagcgagttcagcttgtttccgttgatggtgcctttttcatccttggcagcttcgcaagcatcgcggagggttttcagggcttggtaggtcgcttgcatcgttctcacctcttctactgctcggggcttatccccttgcttgatggccattctacaggaatggcccaagctgtcaaccccttttatgcgggtttctttttggacgccagccgggcccgtagagcccgcttagtcgctcggctgagcttccatttgtcagggcttcgcatatccttttcccgctgcttggcggccttgtaggcacgaatacaatctttgtaaggacggccatagccagcacaggcaaagagcgctgccagcttcacaacgcgactgtcatggtggacccatcgtgccgccaaggaaaggactggccgtctgccgtcgaaatggcagtattccgcaatgatgttatccttatacttgttattcatttgatgaccctcctcggttaatgcaagatttgcgttttcagattggggcgcgggtcgatatcaatggcattctcctttgaggcgaaaaggatagaccaatccgacaggtagtcttttgctgtcatatctttttggcgtatatgctgccatgcggtcatgtaactatactcgtcgatctcgttagcaggcatagtatatgccgggctttcaacatcggtaaacacgattcgagggttcgccagataaagatcagatgactcgcattgaatgtgaaacacgcggcaatcttcgtccaaggttacgattgcgagtcggtggtcaggcgctaccgggctcaagcccgaatcgtagtctcggatgtgctttcgagtgctttctacggcgtccataaggaaactacggacagtttgaacgctataagcggaatccaaacggataatcagggtattcatgctttctatctcctattgtgagccccggcttgccggggctgtgataatcagttggttacggtttccatcctgcccgggcgacgtattttatcatctttttcagcagtttatttcgagaggctttcatcgacggcggcacttgagtggtaactttcttgctgccgaggacagagatcatgccgtcgattgctttgcactggtaagagtcggtatattggcgtttcattgtcagtactccgggtttaaggtgttagtgctgaatcgaaacttcgaatcctgccagaagatactcaccaatcattgcggcgacttcagcacgctccttggcgtcgatggcagaaattccagaaggcgctagcaaggtgattttgcgagtgcattcgtccaccaagcgggcggcacccttgtagccagcatcgccagcgatttcatcgactagacgatggttatggtagtttacgttgccgataatcagtgtagccatggtgttgccctctaggattgcttggttggtatgggtgcattatggggccctcttcgggccccgtcaagcattaaatccccatctcagcgtatttttccatcttgcgttctgcgggagccataatcatagccatggtggcattttcggtccagtcggcgatcacttcgctggcactgttaccgtagattgcccacatagagccgacgatattatccgggccgtcgcccttgcggaagcggacgatatcttcatcggtggattgcaggctgtcagagatttccttgatatcggtagactttttcactacccactcgccatcgctgccatctttcacgctcacggtgaagccagtacggattgcacgcattactgccgccatcactactgctttttcagcccgaatgcgcttttggaccagttcacgcgctttgatatcctcgacgagtgctgcacaatcgtactggcgtacacccggcttgcggtaggcgttacgcagggcgatgcggaacagggtggcgtagggcaggctagtgccagaggccttgtccatgcgggcgacgtagtgggcgtatgcgaaagtgttcattggcttgttcatggtgggtctccggtttgtggtttgtcttgcttgagggccattctacaggaatggcccaagctgtcaacctttttctcagtaccgatccaccagacgggctatgtgtttaatttcttcctgagcgaagaaattccgcaccttgttcagaatattctgacaagccatgtaagtgtcaaaggcctttcggctatcagtatcgtagccgaattctccacagaactcctcgaaagtgtagccgcccgcttcagagtcccggataaggctggacaggatacaggtagcctcaggtgctacagccttgatgtaacgtttttcccactccacccgcatcaggatgttagaggccagacggcggacgtcggcgggcatgggaatcgaggctttgcgatgcccgacgcctgtgcggaattcagcatctagaacgccccggcgaccgtcaccacggacgaagcttacatcccacaggtcatggacccaaccttcactgttgcgctcaccacgatgcacagtggccatggtaacatctattgacttcaggaattcgtcaacggctgtttcgatttctttagaggaaaggttttcggtagtcatggcttatagttccttaggttttgcctatcggcggtttgtcttgcttgagggccattctacaggaatggcccaagctgtcaaccctacaaaccgaagattttcaaaatttctttcgaagccccacaggccggatcgtcccctaggtctagggacaattgctcggtaggacgtggagctacagtttgtgtgaccgaggcggacaatagtccggcgcgtaccatgctagcccattggtctatgctcacctcttggacgcaatcagcttccgccttgcggaatacacattgccggatgccgactcttacatgttgcttgtctacctcatagactctgatccgtgcggtagaatagaaggacagcacatcgtattcatcgccaaaccaatcgtctagctgcctaggggacgtgaaggcgaaatactcaaaatggcgaacatctggtatcccgtcatgctcagggacaggccgctctggagtggaagacgaattcgtcatgcacccgttaacataagggccctcgccgttcttgcactcgattcgataaactacagtcttggcattcatgcctgtcttgtcacccatgatcgtccctctagatcacattatttgctggctattctactgcccttttcgggctaagtcaaggattacgaaaaaccaaaattgcacccacatggcgtaagctggactcccgtaatcgacggcctcttgcatcgtcatcacataggcatcagccataccagtttcccggaagtagtcgtcgatcccgtcagacgttatccccgcttcattcatgatatattgaatgtcaattagcactccgtagagattgacaggcaggtctaactcccgcagacgtatgcacatataccacggcatcccggctgaaattgcgtagtggagaccggcttgaaagatttcagaaagtttcatagatatatctcctattcggggattttgttgtgaatggtgaaccgatgcatatccgccttgtggcgagtctcgataacaggcgtaaaaggcgggaaaacgtcgttctctttgccgtatttcactatctgctgagcatacttctttgccagcgcatgggtagtgaacagggccggctcaaactctggtccaatgccgccagtaacgatgtagcagtgattcgggctttcattacctgcggttcgatcaacgatggccattttctgtatcctttgaggtggggcgcttatgcaccccttggctaggcattctacaggtacaaaaacgcccgtcaagcattatttcagcctaacgggcgatattttacagcattgccagcttgggaagagcatcgacagtggtttcccagcaggctacaggccgcttcgattcgctgtcatactctagcatgatggcacggtcactatcctgatgaatccactcctctagcagaccgtcgttatgagtattccagtttatccaacctagagcatctagcctcacctccaccgggaaggctgcaaactcagccttgagcttggacatttgctcttcagcatgcccagcgtaggcaaagcgttctgcgatgttctgagcggcagcacctgagaaaaactctacggtccggagccagcgcctttcatagtatttcactcggcggacgatgacagcagcacgttggcggtattgtttgttggtgatatgtggagcgatcatggcagttcatcctctgctatcagttgacaggtaaaatcgtagtcgaaaacaaagcgagggtcaacttgaatattgaaccggctaaggtagcgggtcagtcgggcgtcggcattggtcgccacccatgcgtcgccccactcctcggcctcctctaccagccgagcattgcactctgcggcccggcccgggagtgtgtggtcgatgatgtaatcatcgcattggacagcagagcagagggtcagagttaaggctaagatcgacattggagcattcctgttttgatggagattgcagattacagtagttcgtaccgatagtcaagcttcatttggcggcacagtttgttccatttgaccagcaaacgaagcgccgcaggcatgggcagagcttccaccagttcagggtcgccgcctgccatacccatcgactcgctgaagtgagcgcttgtgaacagggtaatctcgccgtcccgctttccgccgacaacccggacacctttgctccagttagcttgagtcatttcccttgatctcccggattagatagcagacttagcggcatcgattgcagattctttatactcgaacggaccccaatggtagctgacaggttcgctcaagctagttccgaaaacgctcacgacgtagcatccataaacatcctcatagacggtagcagtacggctatcaccgcttgcgtagtcttcacttttgaactgagctacagcttccatttttgagtctcctaatgggcggtttgtcttgcttgagggccattctacaggaatggcctaggctgtcaagcattattttctgtcgtctttcagtgtgtagggccagcccagcgcttgccaagcccggaatttggctaccgttttaagagcgtgcgtttgattgatacagaatcctagcacggtcacccggtcacctctataaccgggctcagtacggatgatggcccacctctggccccgtttctctgtcgagtaagaggccgtcactggtaacgctcgatatcacgcagagtcttaagagcatcgttgtgccctatgctcaggttaggatgatacccatactcactcagagcgtcgattgcagcccggttgatccctttccattccgcccatgctgcaatgacattcccagtcacccggacactctcagcaccatatgcaacgaatcgggagttatgatagctgatccgcaagatgttgtgtccagctttgtttgcaatgtagcaggtagagccgtggccattcataagatcgccccggccagtagaagctagctctaaggctaggtcgatcttaggccccaaggcctttagctgggatttattaagctgtcgcattaccggtctcctttgtagcaagccgcacctgccgtcgtctggtactgagagggaaaccacttcactccccatgcggtcagttgggcttgtagttgccttgttaggttttgcccttggctagccttgcgagtttccttgtaatgaatctccccatctgcttgcaccatgactccggacataccctgccctagagcgtcatatacgacaattctgtgcctgttcttgtgatcctgatacaagactaccttgcatccgtttggagccgctaggctccgcacggttcgttctaggcccatcatcttacactgattgaatggtgcgtaaacagattcgtccattgtgttaacccttagcaatgagatcaacagttttctttgctgtgccgtgggcacggaatccgataatatactcccggtcggccacttggcacaagccgcacgacttacaattcaccttgtcgcttttctcagccggacaagctaccactttacgtcctttcggcgtaaagcttacattctccgcgtccatcgggagaatagtcactacaggggcgatgttcaggtcggccagttcatcggcgtgcgctacattgttgcccgacaggttgatagtaaacccgctacgattggccgacaatacgtgctggcggttcatgaaattgttcatcgggtaatgtgtgtaggtgaagccgcgacgacctttgttagccttcaccagttccatcagggcgatcccatcaataacgtcatcctgacccacgagatcgccagcttgattatgacgccacaaatccccacgtgagatagaccgtacttgcttgaggaactctttccactctacgccacgttcacccttgcttagctttttccagtgaatagcagtaggcccataagcggcatagcagcctttagccttgagagggcaggcatccgggcaggtgccgttatgagacgtgctgacaggcatgggaccggttttgctgtttttggaaacgagattgagagtgaagttcatgacggttatcctttatctagctaggcggcctgtccgcctttcttgctgaccattctacaggtattcgaagaggtgtcaactgtttttcaaaacaaaccacacaaaaatcgagaaagacaggatggtccagaacatccaaggtttgacactgcttaacaggatggctctacggtgaacctcttccggtacgctgtacccttggacattggtaggctcatcctctggcagaccgtaggcccgggcacgttgcttcattatcttccggcgtcgggcttttagtaccttagccatttcgttgtattcgtccgggtccgttgcatccctgacccgtcgcaattgtccctctagcttatcgacttcgccgagcttgctaaggtacgggtctatcctatccctcagcggcgtttcatcctcggtctggtcttgaacccacgacgggagccgctgccgtctagccataacataccgcccactgtcccgaagtcttaaagagttttatgtccttttgagcgggcagaccggcgaactccggcatggcgaacaaccatgcaaggcaaaaagcatggagagcatcgggacagggtacgcattgacgaaccatttttggtatctccgctggggttgagaatcctaaaaccactcgacgaatgggcttaggattgccggcatttaagcctgccggcagggcacaaaccttacatatcgctactgaagtcgaaagctcggcctcggctagctttgcgattgtcacgcgatttgcgggactctttacgttcggaacgtttggcggcctcgaactggtaagcggaatcgaagtcggaagccttgatagaacgtgccattttaatctcctttctgtttaagtttgtcttgcttgagggccattctacaggaatggcctaggctgtcaagcttttaatcgaatttatactcgattccgttcaccttcgcacggataagggtttcgagattgatcgtacggaaagcggatttaccctcttccatgttcagcacctcggcagcggtatacaggtgcggcttgccagcgctggtcggtttgcgagtggcatactgtccgttagcatacgcagatttaatctggcgcttgcacgtcatctttcgaacggtgccgtctgccttgatgaactcgacgctgaagaaactgccatccttcgcttcgtcgaggatggaacgcttgcgatctacactgacagacttagccattatttcgcctcctttttgttcagcttgacagcccagcgcttttcagcttgagccccgttgtctaccactttgcgaccgttggttgccatggcgcgggcttgggtacgggttttgaaaaacatttgcatctgctttctcctcgcctatcggcgtcttcgttgtctgtgggtgctattttgcagctagtgaatcaggttgtcaagcatttatttcatctaccagtacgtagtattcgatcccacgccagcctcctcctactcgtgccatatcgccccggattcgctctactcggccagtccatatttctcccgtgccggcatgcttgaggaacttaccacctaccaattgttcgggcgtgtattggcacgttccgtcgagctttttccgaatgtcgccccggatagccacgatatctcctactctgacggtcatcagttctcccctcatgccgtttttacttcgatagaccgagcgacaatcggtccgtcctgcccgatattgtacgataccaccgggagcgattcccatcgacggagcatccactctgttttatcgcagtcgtctgcgaaaggcggcaggccgtcgcggaaagcgatctcatccgcaataagattaagtatatcgtccaacccctcgtctaggtcgagcgttcggccaagcaaggcgaaggcttgaatcaaggccttgtaactcagttcagagagaacgattttaacagaaaggctatccatcactaggcctcctccacagtgatatcagacggatacccgtcatggttgaccagcgatttccgcacctcttcggcatcacacatgatatcgaagaaaacaatgtcgatcaactggccattctggtatacgttccaagcttgcatttctgaatctccttatgctgtgcggaaaggttcgaccgatttcacgtcaaagataaccccgacgccttggacggtcccattgcagtaaaggctgtgccaacgggctgtacccttcgaatgcttcaccagataggtgcggcgacgatacatgtatgcgccgtcttcccattcatcatctttctcgatagggaagtagcggttcaaatctaccgcaatacgatcaagctcgctacgattgtaagccgcgtagagtgcccgatgattacaaagagctttcatatctgctttcctgcgtgggtgctcagggtgattccctttgcttgagggccattctacgcgaatggcccaagctgtcaacccttattttcgttcttcacccaaattaacctgcccaacgtttcaggccgtcctcgtacctgttttctcgccatgctagtccgtctgaaaccataatggttgagtagttcaagctggccgccaccgtgatggatggccagtcgccacggatagacgactactttttcctttgtgctggcgtactgctcaggtttagcgccaatcaatccgcaccactctttccatacggaatcatgaccatgatccggtcccgccttagcgtgagctatttcatggcggatagtatctaataccgcaggcactccattggcagatacgtagctgtaacctagctctatgagctttttagcgtgattacaacggcctagcgtccgtttcatcctgcgattgaaactgaatttccaaccttgttcgaggaggctccacttgtccatctcttgtagggccatcgcccgggcttcactatgtagcatggctgcttacctgccgttccgttgaatgtggggtcattgtgcatatataaaggaggcctgtcaacctgttttatgtagatttttctctataatttttcttgcttgtcttgatagcttgtgtataatgacaggcaggcgggcaacgcaggcaggaggccgagcaccggagataaacaccgagggagcctgagatttaggttggcacgctaattgcaattgcaaagattgtgccataaaaattatgttgacaaaggggtttgtcatagtagaataggcgcatcttaaacgcggggtgcgagtccccaactacatatcgccttcacgacggatagtcgaggcctacgcctgcccgggaaactggtgcgggcttgcaacgttcgtgccaactgaggtccgtcctaggaatttttagttagtgtgctaacgattaaaggtagcttgctaaccaattagatagcctgctaacgatccgcccttctgagaaatccggctaaatttcaggggaaattcctctgtagaaaaatccccttctgtgaaaaactgtccagttcctaaaaatctgcccagttcctaattttgcagcctgtgaaaatctatccagtccctaaaaatctgtccggtccctagcttagatcgcctcgtattcctcccgtttaattctgtgcagtactcttcgctgataccagctaattaagtatgctatacaagccctcttctcaatctctgtggcatccatctgagaaacaaactctttcatatccgctagccaatacgcatacgcgctaccgttgtcaatcttcattctaaccctcctattaagcgttacactgtccttctacggctaagtagtagctcaccatacctacactcgaacggctcttatacgagcattctgagccttttcctgagaaatttcatattgcccatattggccgaaactcccagaaatctaaaaataatttgaaaataacccctgccatgaaaaagcccggctctcgccgggcaattctaaaataatggtggcttattttcgccactctgctccgaccacggtccattcgcgggtccaccgcacctccgaggagctgtgcagattatcccatagaggatcatctacactaatacacttaactaccctctccggcacagagtaataggaagacggacggtcgtctttctcgttgtactcccattttacaccattcactaggtcgagattctgaagttcatccgggacgcttccagattgaatgtcggttgcctttggagacaggataaaatggatactccaccgctttcctaccggcttagcgaacacactaacccacttcgaatctttctcagtgaattcttttctatctagttccctctctagatggtggtaaccccaccgacccccgccccaccctcggctagagtaccggccctttttagctaggaggtgccaagtgatcttcacctgtccgaggtagacagcctctagtttctcctctgtcccatagctaagaagagtgcatcgatcccctgcaaccatatctttaacagttttggccgcctcttttcgctctacgaaacttacagcttctttgtagagagaggagccttccggcagtagaacgtgctgagagcccatccgaacccacacgcaaggctcttgaataactcccttgattactgtgcagttgtagagcaaggtcgagatattcccggtaggaacctctagaacaaagcccctagggtccgtcacacggaaatatttgttctcagtgacccagcgttcaacactgtccccgatgaaatgccccgagatagggatgttgtctatgaagcaagtctcggcattcttacctgcccagctcataccagtctgctgctttttcttgaagctggcagccaagctaccatctttattgaagtccacttgagacatgtatgccaaaagcgtccctttatagtcgcccttccgctcgcttttagctacccatagttgcttcgatatattgaattgcatttttcttccctcctctgttggatgccgtaagtttacatattccggccaaccttgtcaaccgcaaatttcaggcaaaaagaagcccgccttgtgggcgggctgaagtgtggcgtccttgccactaaccatgatttgaatctctacctacaacacacctaattacctaattaccaaaggtcgtctgggtaggcttggccggactctcgaatagccaagtggcgttctagaaattcgatatgagcatcaaaccatgcacggatgcgttgatttggtgcaaagcgtctagcttctttgaactcttcgagttcctgccgcagacgacgtaccgagtacttgcgatacacggcctctttccagcggctagtcattgctagtttccttatactgagtagggaatttcctacatcccattgtaccattcgtcggcttattagtcaatctcaagctaggggcccgggccaaaccgagtcggggtttttaatccacgccttaatatcgatcagagttttgaagccttcggacttgatcctgccttcgcatccataagggtaataataccactttttaccctctttaccgagccatcctaacctctttttaccgaaccggacgatcactcgcccgtccggagtgacagggaggaagttgacgcacttgttagtcgcggacatttcaccactccatgctaacagtgacggtcttagtcttgtcgtacatgttgcggagaatcgcttcccagcctactgccgtgggatatacagcatttacctcgtaggttttaccgtcagaccgcagtcgaacaacatcacctgccttgggtcgcttatcgagggatagagtttctacttctttaggctgtgctttcatgagtcctcctcacatcttgctgaagttttgtttgtagtcattgtacacgctgtcgaacagattcgcaatagcctgaatatgtacttcagacggggtgccagccgggagatacttacctttcggggtaatcagagaggttgcttcctgcccgttctcaccagtatacgtcacagccgcgtttactgcaatcttaatatcgcgggccgtagcctcgcccgggcgcataacctgtttcacttcgctaagaacacggtccttggtggtgaattcacaagcaggtttgcggtcttctaccttgatgcacatgctatacagcagcttctcgctcttcacggagcgaccgagattgatggtgccgtcttcagtagacacgacaatatcctcggcgggcgcgctcttgttggccaacgcagtaatcccgactacaaaacctattgctgcgagagtcagagcgacaacgacaatcaaagcctgcacaatctctttcatattcatcagagcacctcctagttaattttggaatccagtacgttcaacacagcctcagcagcttcacgaagctttacacggagcttgtcgcagtcctcgatactcacctgctcattcatttcagccatagtgataagcccgtgaatataccctgtgcgattagataacgccctgtcacggaagttctccgagtacccagttacgtcctcttgcaagcgttcgatacaggccgagacatactcgatgatcttctctgttgtagccatggctcctcctctgtctgatgtggccatcttactagcacttctattcgttgtcaaccctcttgctgtctgcgatatcctgtagaagctgcatcctgacgaacggtttatctttctctgccttctcgcagtcagggcagtagatagtgcatactcctcggacgtacagtttacctccgcaggcgtagcacatgttaatgcctagcgagtctacaacattaggcttcatatgcttcactccggctcagtacacaagctagtaggcaggggctcttatcgaagctgccttggaaatgcccatagtttgcagattccccgcaacaagggcaaacgtagcccggtagagtatagatagcttcgtcttgatacacccattggatatcttccagtagggttttcacgacacgcatatcacacttagcgatagccaccttagccttgagttcggctacctctttttctaactcaccgactcgccttgagaaagcgtcccggtcatacataacttgcatgtatttatcgaacatatccattagtctacctcttctaggatgatgtagcccggatacaggaatacttcagcgataatcccttgacgaactccgagttcaacgcctgtgacaccatttacatggatttgaccatgcttgtcctttgtccactgaacgcctttaagcaggttataggcggccttctcgcacaaggtcagaacgtgccgaccttcgttatcaagcacaatataccgagatttatcaatagtttgttccattatactacctcctcaaaagttggaactaagattcgttgctgtccattgaataccggtttatcaggctctacgtcattgtactcccagatgctgatgacgcgattatccgcagttacgcaagtgaattcgcagtacttagcccctccccacgcaatcgctacgtccatagcttgcgtcgctgaatcgaacggttcactggtctgcattagtcgctttttaaaatattctttcattaaaacacctccagtcctgtttcgcggatagcttctttgcagcgattgattgtgtacttttggatgtcgataaatccgccttctggcgcgggaagctcaacactcacttttcttcgactagccatccagatatattccgcccatcctttggcacaggatttacgaagttcttcttgctcgtcctgtccccaccatttatcgaactctttgcggagtttgctgttcatcgcgtgaactccacaacccatacagggttgatcccgccagtgaagtc

SEQ ID NO: 4 - DNA, 66289 bp, Unknown
  source: /note="Description of unknown: bacteriophage strain capable of infecting bacteria of the genus Pseudomonas"
ggggggggttgtaatggctaactacaactacatcgtcgatactggtgtgatagtcgcagataccgccgacgttctgagcgacgttgaggccgagttccgcgccgccctcggtgccaatatcaacttggccgcgagcactccgcagggatcgcttgtcgcggccgaggccatcgcccgttccagtgtcatgcggaatgaagcgcgaattgccaataccataaacccgaacgtttcattcggaacgttcctggacgcgatctgtgccttgatggggatcgagcgcggttctgatctgtcaaccttcggctatggagttcaagtcaccggccgcagccaaacccgcatttccaccgggtctagggtccagactccggccggcgcgatcttcacagtgatgagcgatgtcacgatccctgctggtggtgtcgcgaccatcgatatcaaatcgcaggagtatggcaacattcctctgccggtcgggaatctcatcatcatcgacggaacaattggatggtccggagccaaagtcatcgcctccactcgcgtcgatccgggcagccgccaaatgagcgatgcagagttgaagaatgcccgcgttaatcgattggccatccaaggccgcaactcgactatggccatcaaggcgtatgtgagcgccgttccaaacgtcacgtcggtgaacgtaatcgagaacaacaccggcgccgttcaagtggtgaatggagtctcgtttacccttccgtatgctgtttgggtctgcgtcgccggaaacccggataaacaagcagtcgccgatgcgttgtgggccgcccataacggcggaactccatgggactatggtgcgacgaacaacggcgtcccggtggacggtccgaatggcgttcctgtgcgcgatccggcgtccggtcgaaagtatgtcgtgaagtggaccactccaatcatgtacgatggatatgttaacgtaacagtccagcaaggttcctcctctgtagctccggaagccattcagaacgcagtggtcaattacacccaggggaaagtggaaggggaagaggggctggtggtgggcgcgagcctgtcggcattcgaagtcgccggagccatcgctcgcgaaattcccggcatctacatcaaactctgccaggtcgcgtgcgtcgcggctggctcgccggctccggctccgggcgatttcacttcggaatacgtcatgagcgcattcggccaggctaccatttccgttggtaacgttcgggtgactttcgtatgactctgcctgcgtacaattcggacatccaacaagctctgaaatggctccataaccaggcgcctggaatcaccggcctgatccagagaaaggcgcaatggtatgacagattcagccgccaattctgggccaactgggagcgcgacgttttcaacttgaagaccgccaacccgttcggccttatggtttggtgcatcatcctcggcacgccttcgaaagggttcggcctttatccaaaaaacagttcttgggcattcggtcggctacgccagaacttcatctatagcggtacacaagtcccgccaccggcagacgcatcgcctggcggcaacttctacggtggcggcaatgccgaaattctcaacttggacgaaatcaggaaagtgcttcagctaagatatgtagcgctgatttcgaacggctcgattgcatatatcaatcgcatgcttcgttacatattcaatgatgatgagccatgggacgaggcgaccggtctgtacttctatctcatggactcaaccggcgagaatggccctgtggagaacttggcagtatatcggaaagattgggaaggtatggtgttgttgtccagttcgcccagaacgaaccacgtgctgacatcgacccctgccagcgacgccgattggccaggagtcgatccggccgcgagcggaattccggtaacagtcgaaacggcgtccgctacggccccggacggctccgctacggtgtgcaagcttactaagccggccgggagtaccgcttacgtctccgcgccgatagatgggccgctggggtccggtagcactgtaacgttctcgttcttcgcgaaagccggctccacccgtttcattgcaattcagtcggctgccgatttccccagtcgagccgatgccgttttcgacctggattccgggaacgtgatcagcgatcagatgttggacagcagcgtggtaagcgcccgaatgattcgtctggaaaatggctggtggcgttgcgttctcacgaccaagaccgtcagctcttcgttccgcgctgcttacgtcgctccggcagaaaccaacttcagctggattgattcgaattccagcgcggcgattgacgtgcttatctggggcgctcagatcgaactgggtgatactccaactggatacttggagactaccggggcgcccgtaaccatcaccgattatgttttgcagaacgcccagaccggaacagtcaagttcacacagccccttccgaccggagtagacgcgtattggactggagactggaaaggcgggtctgcgaccgagccggccagattcgcagtaggggatgagactcaagatacattcaatctgtccagccctgcatacatcggcctacccactagtggggcgttcaagctagaatacagagttggtccggcgcttaatttgtcgccgcaattgatcaacctcatgaatgaccgggcggtcggtatcatgccgacttgcgccggttgcgatgtaaaagtcattcaggagtaatgacgtgatcacacccgaactgatacccagtccgtttgctgcgcagggcgacaaagacccgatcccgcagacctcttccactggttttgccaaccttcgcgatggctacacgccggactacgaaatcagtctggcgtcgaacaacccgcaggccaaagcggtcgagcggaaaattcaaaaccaactcttcttcatcgcgacccagaacgcacaggcgtggcagcgacaaatggcgccgccgtggtttcagggcatgcctggcggctatgaacagaatgcagaagtcgtgcgcgtcggaaatgacggcataatgcggcgttatcgctccatggtgaatgccaatgcgagcgaccctctcagcagcacgacttgggaagaacaacccgcatggtcggtgatgcgctccaacatcccgatgccggccggaggcccaggcctatcttctggcggagaagtcatcacgaccggccgcaacttcaacgacctgttaaatgggacgtgggagttcttctctgattcagtggttatcgcttctcagaatgcccccgtatatccggcttccgctggtgccgctgctggcatgttggaggcgaaatcttgggtgtccggagccaatacgttctgcgtccaacgctacactgatcgcgtcgggaacgtcgctgtgcgcgggcttaatgccggagcgtggaccaactggatgtatgcggtaaacgtcatggcccttcaacaaggtcgggtcacctatggagtcgcggccggatcggcgaacgcttacacgttgacgctagttccgcagctccaaggcggcctggtggatggtatgattcttcgggtcaagttcaacaccatgaacaccggcgcctccaccatcaacgtctccggactcggcgccaaagccatcgtcggcgcggccaacttccctctcaccggcggcgaacttggccaaggactcatcgctgagcttgtattcgacgcagcaggcgaccgctggagaatcctcgcaggcgcgccacgcatccaagttggcaacgccgatcaagattaccaggcccccagctggaaacaggtgaaggattacgtcgcgtcccaaaagctgactgaagtggactgggctgacgtcgtcaacaagccgaacgtcgctatccaagacactacgccgtggttcgccaatctggagttgtccgacgctcggcctttcatcgatttccacttcaacaacaaccgcgccaaagacttcgactatcgctttatctctgaagctgatgggtcgatggcgttctactctcgccaggggtcagctggtcctacccaggatatcctgttcagcaggtcgaatgttacattcctccagccgcgactggatgttgcgaaaaacctcgcgtacatcgcgaactctggtcccctttggcagaacaccactgccgatcaacctggttggaaattcaccttcgcacaaggcgtggacgccaacaacaacgcggttatcgcagtcaataccaccaatccggacggctcctatcgctcacagatcatgcgatgggactgggcgtccacgaacgtcatattcaacaatcgtccgctctttgccggtcaatacactccttgggattctggaaactttgatccctccaccaagttgactgtgaatgccacgaaccaaatcgccggcccgaccgggattcggaatacaaacggcaacaccggcaacatgaacacatggggctccagttccacgacggcttcatacggaaacgctgctattcaaatcttcgggaaaggtggtggcgagcctgccgcgctttatttcgacaactcccagacaggatggtatctggggatggacaaggatggacagctcaagcgggccggctggtcgctcggcaataacgcctacgtgattaccgacgaatccaacattcgtttccacgtgaattccatggctggcactcctgtttggggcggaaacgaattctgggggccgtggaactttaatccgaacaccaagctgaccatcaaagccggcacccaggaaactagcagcactgcgatattcagcggaactatgccattcgctccaatcgcatcgctgtccgattattctcaggcccctttgacggtttacaacgcgccaaccggtccgtctgcaaaaccggccgtcatcgcgttcattcgtcctggcaactggggcgcgttcttcggcatcgataccgacaacaagctgaaatggggcggcggatcgctcggcaacagttccagggaaatcgccgattccagcaacataatgaatctttgggcggccaacccgaccgcgccgtcctggaacggccaaaccgtttggcgatccggaaactttgatccggcgacgaaagtggatttgaacgccgcgaacgccaccaacggcaacatgatcttcaaccgcatttctggaactggtagcggcatagcttcgtcaggtcgagttggcgccatcaacctgcagaatggggcgcattcggggcaagcggcagcagtcactttcgagcggggcggcagtatcttcgtcaacttcggcttggataccgacaacgttctcaaagtaggtggcggaaacctgggggcaaatgcctatccggtcatccacgccgggaactacaataactacatcaaccaggcgctggttcaggtgggtcttggcggagtcggttcctatggcatctttgcggttctggacaatgccgctccaaccgcgaccgttcaaccgggagtggttgtggacggttccattctcatctactcgtcttgcgccgcaaactacaatagcggtcaaaggcctgccggaacttggcgctgcatgggatatgtagtcaaccgggatgccaacactcctgactccgcgacccttttccagcgagtgacgtaaaatgaaatggacgcggatcagaaaccctcgttggctggatgaaacaaacatccacgccatggtgactttcgatgggatcggggaagttcctttcaccgccaatccgcacgacgtggaggcccacggaagggccatccacgctgcgatcctatccggggcgcacggacctatcgccccggtcgatgcgaagcgggagcaggccttgcaggacgctatacgggccagggaaaagcgggctatccttcgtgatacccgctggcccatagatcgtcacgacgagcagaggcggctgggtatcgaaaccacggacggacctgggttgatagcagcccttgttcactggaggcagcagattcgcgattggaatagcggggatcggccgcgacttcccatggctctgaaaacgatgttcaaaaatcaggagtattgatgaaaattacaaaggatattcttatcaccggaaccgggtgcaccacggatcgggcgatcaagtggctggatgatgtccaggcggccatggacaagttccacatcgagtcgccgcgagccattgcggcctacctagccaacatcggcgtcgagtccggtggactggtgagtctggtggagaatctcaactacagcgcccaaggattggccaacacatggccgcgccggtacgcagtagacccgcgagtccgcccgtatgtcccgaatgctctggcgaaccgcctggcccgtaacccggttgccatcgccaacaacgtgtacgcggatcgtatgggtaatggctgtgagcaggatggtgacggttggaagtatcgcgggcgcggcctgatccagctgaccgggaagtcgaactattcactgttcgccgaagactccggcatggacgttctggagaagccggagcttctggaaactccggccggcgcgtcgatgtcttctgcctggttcttctggcgcaatcgctgcatccccatggcggagtccaacaacttctctatggtcgttaaaaccatcaatggcgccgcgccgaacgatgcgaaccacggccagctccggatcaaccgctatatgaagaccatcgccgcgatcaatcaaggctcctgatattccacccaaagaaaaggccgcttattcagcggcctttttgctttctggctttgcctcttcaaccatcttgactgcaaccggcgcggcggactcttcctgagtgaccgaatccacatagttccctagtgaactcagaacgccgattaacagcgctcttaccaccttgtccttgactgtctcgcctatgatcttggtcagaacggatattaactcttcccggagtctggggctgattcttggccgaaagcgcttgcgatgctctttgcgtttcatgtttagtcctctgtctgcggtcttctcctcaccccgataatggcttggggatgcgctgtgttaatcggaaggttcgggcgctattataactcgtcgaaaatgctcgcgcttaactgtttaacgatacgcaccgcgatattaaatcgccttctttctggccaaggaactctggcggcctggtccggtctaaggcctaatttgtcgacattaaaacgagaaaacccggatcgcctgtaggacaaggcgtccgggtttatctcgatctagtgtacgctagaatcagtggcttccgccccatccgtccagccagcaatcgaagacggcgtgtcgcggcttgtccttggcgccatgagagaaatgcttgaatcggatgacctggcccttgatggactcccggtcgttccagaaacgacgtttctcgtcgtgggtcaggctggatgccgacacgttgaaagtgactccaggccacagacgttcgttgcggcagactaacgcaccgaccattccggacggcgacaggttttctgcgtggctggagcgggccgtgtggccaagttcattgatgaaagcttcattgttgttgtgcatcaactcttccacgtcgatgatctcagcttcatcgtagtcgtatcgcttgactttcacacagtgcccttccttggcagtcgagcgaccgaacttgtacagcccatcagcgcgcttgcccatggaaccttcgaatcccagcattgtgtggcggcgctcgacttcgctgaactgttcgatggaagtcaccagttcctgctcgaccaggtgaatcctctcatagccgaggcagtgacgaaggaagttcacgcgctcggccgccctggctaggcgatcttcggtcggtgcgcgaggatcggtgaaatcatcgaacacatggaaagaccagtccggctcaccgctgtggcggcgaagatcgccggacgacttctggaaaactttcgggtcgctgatgtcgccgcagaccagctcgccgtccaggccgttgaacaatttatcgctgaggtattcgtagatcgattgattgttctgccgcttgagttgacgagtcagcgcctcgccttcgaatacgaagcagcgaaatccatcgatcttcggcgagaaatacatcggcagttggccttccagcagcttcgggtcaaaattcgatgcgagcatgggtttcatacagttctccagaaaagaagcccggcgaaccgggctaaatggcggtaagccggctcagatggtttcgttggcatagttcagttcggccatgatcgacgcatagcgctcgtccgactccttgatgaaaacgccgtcgtacatgacgcctttgcgatccttgatgatgtcgtaggctgcagcgtagcagtcgagcatggtggtgtcgtgctcttccgtcaagtcgaacagagtcatggcggccgataccaggctcttgatggccaacccatgatttccacgtgccagagcgcctgccagatcgccgaggcgctgcaaatcgtcgccgtaggtgggatgtacttcgccgctctcgatgaaggccgacagatgatcgaacagattttcgccgagttgcgcggccatgatcgtggcaaccaccattacgtcgccgatgccatctttcacatcgaccgggttgttctggacccaggcttcgcatacttctgcgaactcttcgaccaacttcaggaattgatctttcgcagacgagcctttgatcaggttacggtcggaagcccatttaacaaccaggtcgtgaagttcgcgactcatgatttgttcgatattcattctttcgattccttttggatttgggattttactgcgttgattatggacgccgtgctctggcgcgatccatccttggtggtgccgaagtagaatgccattaccgacttcagttcggcgaaccaatagccgatgatggtgccgatggcgaccgaggatgtcgggtccatcagagcctcgcggccgaaggtgaagattgcgatgatgatgaggatggagcctgtcagaagagcgaatgtaatcgacgggcgaacgaaatcgttctgctgcgcggcaagcctcctcgccgaatccctgtcggcagcctctgcggcgaactggctaagctcggcttggagctggttctgctcagactgaaggcggttttgttcggcttgaatcgcaagctcctggagacgaacgcgctcggcgctctggagttcggcgaggcgcgctagagcttccggattcgcgtctagagcgctcgcgaccgaggctgggtcggccttcgaccccagcgccgtcgcgacgatagcgcccacggcggcgcctgcaggcccacccaggagcgacccaagagccggggcagccgcgccgatcttactacctatgtccttccagtccattttcgactcctcagaagaaaggcgccattacagcgcctttctccggccggtgatttttagaactcttcggcttcggtcgcatcgccgacgccaccggcgtcactgcgaggctgttcctgcttgctgtagtccaccttcacctcgccgccgacgaacgacttgtacaggtcggccgcagccttgaagtgatccgggttcttcaccaggccttccagctcgaactggacgccggaccagctgcccttgtcgttcgacatgcctacggtggtcatgcggaccaggttggcgaaagtcggcggggtgcgcaggccctgcggggtctgaacctttttctgggacagcgcggtcatgagctttttcgaggccttgatctgcgaagacgacagggagatcagagcctggccgaaatcgccggtgtccggatcgatgacgatgacgtaatgaccacgggtgtcggcgaagtagtcagacttcttgtcgctgaccgaaccgtcttcgttcggcgcgtacaggcgcccttcgacttccttcaccttggtcgggtctttcatcatttccttgaagtcttcgacgctgatggcgcccttgaaaccgccctcggcctcgcgaccggcccagcggatgaactcgcggcggtacgcggccggaatgatcagcaggccggtcttgccgtcgtaaatcttgccggtgacggtattcaggaacatgccggccttcgcgccttcgatgtacttcgggtcatcttcatcgacctggggagacatcttctgcagaacctggatgaaggggatggcataggactcggcatcggcgccttcgaagcctgcgccgtcatacgatcccaaatccatgaagtcgggaacttcggtagttgcgacggcgccgccaccggtggcaactgctacggccttggtttcttcggttgcttcggaagtttcggttttcttaccagccatgttaggctccttgtttgtcgaatttcagttatcgctaactgtgggtttataataacggaagttgcaactaagtaaagcaaattacatattaagatttgctctttttcaccttcggtttcgtgattttggcctctttgtattcgtgcacgccgatgaaatctggcagctcttcgcccttctccaaatactcgcgaccgaacgcctggagggtctggtagtggacatcgcggttgatggtggcgtcatagccggcctcaatgatagcctcggccgccttcttcgcatcttccatttcgccgcgaccgaattcggccagaaccttggtcttgatgatgccgtcgttgtcggtgtcttccagccacttccagaacttcgatttgttctcttccttgacggaaatgatggccttcggctcgactttgaccgtgcgaccgtccgccagagtagtggtcttttgaccaagctcctccaacagctccggaatggtgttacgcttgagggtcttcagctcctcttccttttcggccagcgccttttgaagatcgaggatttcgccgtccagctgcgaagccttgtccaccaagttcagcagtcgatggccgatgtcggtggcttcaaccgccatttcatccatgacgccaaaatagtcgatttcgcccggcgcgttctctttcaagtattccgggatttcaagctcttgctctttcatgtccgcctccaacttagtgatgttcccttacttgaactaagtattgagtagatattatgccgcatcttccttgatacggctactgatttacatattaaatttcgtcgcgagtgctaacgtcagcctcaaacacgccatcaacgacataacttgccaggttgcgcttccactccaagctgacctggattttctcgtcgatggaatccaggcagatcaggtcgaagtacaaaaccgagttgacggtgccgattcggtgatttcggtcttcggactgcatccgcaactcgttgtcttcgtcggtcgtgtagtaaatggccacgtctgcggcggtgagcgtgatcccgatccctgctgcggccgggttgcccaggaacacctggacgcgcttggcctggaaatcgtcgatcaatttttcccgctcggcctctttggtctcgccgtagtatgtgccaaacgaaattccttgggcctccagatacgccttgatctggtcgatttcctgaatgcgcatggcccagatgatgatggagcgctccgggtcttcctccagcagaccctccagaagatcagtaaacacggcgaatcgcgggttgtcttcgggcggcaggatcaccggttccccatagacgttgatatagccggacgccacttgcttgagcttcgagcgcgctgccgcagcatcgaaagatacatccagcatgaaatcttcgttctggagaacgaagtggtagtcttcctcaacgcgctggtaaacctttcgttgctccggcgacatctcgaagtatatgcgcttgtacaccttgtccggcaggaatgggagcgcttccttcttcgtgacccggaaactgtgcggctcgatcagggaccgcagcttgtccaggttccggaataccgggcgcccacactcgtctttttcaaccagttgcggcggcatggtttgcttcccttccagcttgcgcatgatagcgatcattcgaggatcgtcactgggcaccaagacggaaaattcggccacaaacgcccgataggatttcgtccccagaattccattgcgcaagaattggaattgcatgaacaaatcggtcggtgcccgcgtcagaggagttccggaaaggatgcgacgggccacggccttctcgcccagctttacgatctttttcgcacgcttggcttgtgggtttttgatcctcgttgactcgtccacaattgcgcaaactttgaatgtatcaaggaatcgctcgacctcatcatagccagcctggtggttgattgcgtcaacgtttatggcgaagacgcgaagaactttttcatctgcgaacgtctcggcatacagacgatccaagcgcgctctggcctttttggaagtcggtcggccgcgccaatccacgctcaaagtcttgatcgcgacgtgggtgggaatctcgcgcagaatccagttggtgtggacgcctttgggggcgacgatgagcagcgcgtccacgcgcccctgtaggaagaggcgaacggcatcggccaaagtcgtccaagtcttcccggtgccctgctccatcaggtatgcgaaattccgtttgttcagggacgcggccagggcattgaactggtgctgcatggcctcggtcttcatgcccttgacgggatatgttttggctttcatttgttctccaaatcggcgaggaactgaacaatgttatccagtccttctgcatagctcgcaacttccaccaagtcgcggctgttaagctcgaacaaatcgagcatgggattcagcagcagccaatcggtcccgatcttggccaggacgaagccacggccgccccagccgatccgttcccgaaggaaagggatttgcccaggctcgaaacatctggccattgggcaggtggaggcgcgtttcggccactcctccaacgccttgaactcgacccagaactggacacctcgacgattcaggcaaatcgaatcggacataccagaccgccgcgtctccagaaagtcgatcaggattcggccgagtgagcgttgcttaaacgcattcgccgctttcgtttcgcgatcattcatcgccttcgccctctttggaaactttctctgcttgcgctgccagctttgctttttcgcgttcggtcaaaatcctcttgacggccttcacgatgaacatatcgattccgctgagcttccagcctttgatgaggaaccaagagcctgtcggcgttccttcagcaatctgctttccgtattgcagatatttttcaggcctaattctgaaacgtatcggctgatcaaccgagtcgtcaacacacatgatgtcgagaaactgcgactggcccttgtacaccgggtttttcccttgatctgccctcttcttctggcgaatcggttcgttctcatcagacagaacttttttcaccatcttgacaatgaccaggccatcgtctccatcgcggatatcccgaatgttctggatggggtttccggaagttactccaaccagctccggattgtcataagcatgaccccagagcgtgtgagcttcgttcaaatctgcgaattgaacttcagaattcgacagactcgcggcgactttctcccaatcctgaagcgtcttcaggtgggttccggccagctctttatattgagctttcagctccctaagatcggcctttaactccttcagatcggccttcaacagtttttccagttctttgtcttggctgattttcgccgaaagaatctgggcttccagcgctgctacatcagcagccttgtcctcaacatcctgtgccgatatcgggcaattggccagggcgatcctcgcggccttgacgtcatcacgaaggcgcaggaacttctctgccttcgccgggccgaagcctttggcgttcatgatgccgccgatcaggcgtccgtccgccactacccagttaagttcggaatgctccgggtccagggccgtatattctacgccttccttggccaattcgcgaaggatagacacagtttgctggtcgtctttcgccgcccgaaggcacgcggccgcgtattccaggcgatgatatcgcttcatgtagcaggtccagtacgtcacaacggcataacttaccgagtgggagcggttgaatccccaggcgccgaacgtcaccatttcctgccaaactcggtgggcgtcttccggggcgacgcctatggtcttggcgccctcgatgaacaattcccggcgcttgttgaagaactcttcgccctttcgcgcagacatggccttccggattgccgatgtctgctcccagtcgaactgtccgatgtccttgacgatggacatgatctgttcctgatataggaagacgccgtacgtccctgacagatattgctcgacctgcggaatggtataggtcacaggctcgcggccggccacgcgctcgatatacttggttgccataccagaagacaacggacccggacgggcgagcgccgtgatatggtcgatgttttcgaacgcggtgatattgatcgcgtttgcgaccgaacgaactgcctgcccttcgaactggaaaatgccggacattttgtcttcgttgagaacatccaggaccgccttgtcgttcaaaggcaagtcgtacaactcctgcgcagtcacacagttcgcgtcctggatgacgcccagagttcgaaggccgagcgcatcgatcttgaggagattcaaatattccgaatccggcttatcgagctgcgcgacgccttcagaagttaccgtacagaagtcgataacttcatcgttgcagaccaggatgcctgccgcgtggacgccagagtgggatgggtgaatttcgaggtcgcccatgcaggcggacgcgatctcatacttttcgcggaagtcgcggccgggctgagttttttcgaaagtgtcctccaatccttttccatatcgttcgtccgccgatgtatattcgatgatcgagtttttgatgttgtcggtatcgtggaaggggatgccgaagcgctttccgacgtgagcgataaccgacgcggccttgagtgtgttgatgttacccaacttcacaacgttccaagtgccatacttctgctggagatattcgaacactagatagcgatgggtatcggcgaagtcgatatctatatcgggaagatcggaccgggaaatgtcgataaagcgctggaagaggaggcgatgcgggagcgggtcaacctcggtaatgcccagtaggtagcagaccaaagagccggcagaagagccgcgagccgggccgaccagcatgtgcttcttggcgaacgcaaccagatcggctaccaccaggaagtaactgtcgaagtccttcagctgaatttgcttgatttcttcttggaaccgatcttcgtaaacttgggtccattccttgatgtggccgcgactgagacggtaggcttgcccctcgcgagccagggcgacgatatcaccatccaagtggatcatcggcgccttcgccagtttcacatccgccaaccgctcgactaccgcacgagtattggctgcggcagtatcgaactcttcgcgagtcatgatgtggcgtaaacggctccacagctcctcttcggtggcgatgtggcgaaggccgaccgattcccgcaccttccaggccgacgcgaaatcagcatggtcgatggacggcatgtcgttgtaagaggtaattaccaccggctttccgaatgccctggccgtctccatagcgccgtgcgcggcgaccatcgacgcgggattgatgtcaatgtagtcgattccggccagatccagatgggcataggcctcgccagcgaatttgatgacgccgtcagcttcctggaattcttgcggagtcaatccttgattctggaccgacttggaagtcaagcggtagaacttcttggtgtccttggcgagcacccaggctttgagcttcagctctttctcgccatcgtcggcgcatttgatcgggatttccatgccgaatccgcgaggcagttctgccttggcagcggcttgttcccaacggacgtggccccatgttccatcatcgacgatggcgacgaatggggattcgatctctttggcgcgctcgatgatctccgggaatcgaccatatgcggcgccgtaggagtaaccagagcgaacgcggagctgagggaaagacatcatgcggcctccattgcttgatacgcccgatacactcccatgcgcttgcagacttcgtggagcagccgcacgtcgtcgagcgcccggtgtttctgtacatatgggccgcagtagtgctcataaagatgttgcagccgcatgcggtggccgaacaacggcgccgactcttccacagtacagatatcgagcgatgggaaattgacttcgtccaggccgaacttgccgcgagccagatcgcaggtcagcatgaacttatcgaatggcaggttgtgggcaatattcgcgtcggctctggaaaagaagtcgcgaactttctggcgctgatcgaggaaagatgggtgcttgatcaggtcttcgttcttcaacccggtgatcttggtgatgatttcctcgataacgattccaggattgcagatgaactctacttcatccaaaatcttttcgccatcagttatcacgccggcgaattcgatgattctcggctgctttctcagactcaccctttggtggaacgggagtcctgtggtctcagtatcccatacagcgaatatcatgtttgttccctcttatgtcgaaaggccggctgctttcgcgaccggcctgaggagtatatctcgacggctgaagatttacgccttctgtccgtctttcggcgtgatgcggccggagcgcatggtggcgtgaacaaacgccgaatagttgatcgagtccaaggccgaatcgacatccttgaacccgctattcgccaggcgagtgagtttacccaccatgtgcatcacgaacagggcgagtcgatgatcatcggcggtcttcgccaccaggccgttcgggaagaggatttccatgatctttccgtacatcaggtcattgcgaccataggtgctctggcgggcgcggaagacttctgctgcggcgtacagattgttgagaacatcttccgcgaaatcatcgggatgagcgtcatcttcgccaggccagacggattccatggcgaacggcgcggcgtcttcggtcgggtcttcggactgagccgtttcagcgagcggagacggggctttcgcaaacgcctcgtcgagggtaggggcggagttcggggcggccgggaacggctcgcctgccatgtcgttgggcgcgctatcggggtcgctatcggccgcgacggcgaagaacggcgcatcgcaaccttccaggttcaggatgtaggagtcgatccccaggctattgtaggcatcgatgatgtcctggcgatcatcgaacgccgcgacgatcttggtgacgccttcgatcttcttcaagatgtcgagcgcgactgcccgcttgaactgaggcgccggctcggtgttaccatacggtcgcatgatgagctcatactcgcgatgctcggcgatgccgagttcgcggtgaatcttggccctggtctggaaaaagtggttgtcggttcggccggtgatgaagaagatcatgaggtcagcatcgatagcatttctgatgcgacctacagcatgcgggttgagagcgtctttgtcgagacgagaatgatactcgtcccactgccgttccaaggcgaagctcttacggtggctatcgtcaaagacgcagccgtccaggtcgaagatgatgatgccattcttgggtttgcgttccatattcagatttccttgatggttgctttctgggtgacggttttatcgatgaacgtcccatcagaagtgagtcggaaaacttcgcagctctgagtgaaatcgaacgattgtacgttcatcgtgatgcgaatggattcgctgccgttggtcacttcgacttgtgcgatgtcgccaactttctcgacaatgatcttcatgttacatggacttcccgttgacggccacagggttggcctcctgtttttccgattcccagaaatcgcggcgcagctcttcctgctcggccgagcgatccatccaggggcgatagaacttgcactggtagataggttccaacggaacatcaaccacaggaatctggccgggcttcgtctccagagcggccatgaaccggtcataggatttctgctggatttcctcttcattcatcaccttcgacccatagcgcgggaaggcgcaggagccggtggcgacgcagtgcggctggagtaggctgtcgaacatcggatagacttccagaaccagccggcgcatctcgcggaacacttcctggtattcgccctgggtccgaacgcacaggcgaaccttcgccatgtcgctgagagtccgcagattgaacttggccgcgatcttcgtttccatgttggaagggatgatggcacgagcgtcctggagcgacgcgccggcctccagcagcttctggtagctggtttgcgcgtcggcaatggcgtcatgccacagacggttcagctcttcgcggacatggtaggtcgggtcaggctcgccatttaccgtagccggttcgtcgaattcccagcggaaagcttctggttgaacgacggcgctgatttccagagcgcgactggtttcctgctggtaagccccggtacgagtacgaacgagttgatgggtgaaattcttgctgacaccctcgatctggaaaatgaagtccacgaactcgaacggcgagcggatggtgtccagcatgtacttccagtggtcgagcttttcggcctcggtcatggtcgccgggtcttggccgcgcatgcgggtggacttcgttcccaggagcaattcccaggcgttctgggtgtaactgatcagagaaatcttcatcagaaatcttccggaattggcgtgaagtggaatttttcggtgagagccagggccaggccttgggcttgctctttacgaaggccatactgctctatctcttccttgagcagttcgcaggcctccagacgcgactcatactcttcagcctcctgaacggatgagaagacggttccatcagaggttcggtacacaagttcaatcgacatggcggcctcagtagcagcggatgatttcggcgcggatgtcgcgacggtcgaggtagtgctcacgaatcttgtcgcgggcacgctcggcctcttctcgactgccgaacgacaggttgaacgaagtgaaaggcttatcgtccaggcgcccatcgccaatcaggtacaggatgcctaccagcacgaaagacggcgctgtctgtcgcgtttgcggcgggtcgatttgcatttctaggaaagacatgggaacctcttcaggatggtctggtgagtacatcaatagcgctcctgctgagcagctacggtttccggctcgtagatgagcatgtcaacgatttccggacactggcctttcacccagtcgatggccgcgaccagtgtggtggaagcggagaaagagaaagtgcggtaagactcatggatgtacggagaccccatagaatcgcgctcggtggtgcgcgaaatgactgctttgatattaatgatccggcccatcttcggcctccactttagcgattatatctgacaggcttaacttctcgccattcaggaaataactggcgcgaaacttcctgtcgccctctggcccgacgattcgggccgttatggtgagactcccgccgccaagggcatcggtgtcccggaagaaagctagcagcgcccgcttgagcgctgcttcgcgaggatcgacggccattaacctaccacgttccagccgtgctgagcgcaccacacggcaccggtccctgcaggaagactattcagaaggaacacaggagtcaggcggccatcctcggtcatatggacgaagtagcgggcgccttcaccgagccactcggccttggtgatggcacgttcgagattggccttggtggcgtaggtcttggtgtggttcttgtcggtggagaaggttacttcgcgggccatttgtcgattccttttggttgaagggtttcgcgtttcgatgagggaatattacgaccacctgatccagaagtaaagcacttctgtaaattacttcacgaacattttcttggccttctgataagacgaagaagtcatcaggcgctcgatgacgtccatgtcagaaaccagatcgtccagaaggacgttgcgccaggtagcgaaccggccgagcgagaagatgccagcctcatgggtgagattccagatcatggattcgcgctcgtcgcgaccgagcggaatgattttgcctttggtctggatggtcggctcgccatcttcgatgagctgtttccttctgatgccgaaggccgcgcagacttcatccagatcccaggccggattccattcgatctttttgatctcaccatctgcattctccacgacaccattcgcgatggattccacgatcaaggtatcgccggtgatggacgcacgaaatgttccgaaatcgggactggggaaatacacggtctggaagacgtcacaagggatggaaagcttgtatcgactcacgatgatggaagtgcctttaccgaaggacgggtcgattcccaggtccagtcctgccgcagccaggttggcgcggaatggcgcggtgctgatgacattcacatggtcatcttgccggcgaagatactggaagaaagaggcatcgaaaggacggctccaggtgatacggttcgcgagcttagccaccagctgctcatagtagtcggccggtgcgatccaacgcttttcagtcgccagattccagatggaccggtccgacaggccgcccgttactttcctggagtacatgttgcagtggtcgatacgcggctgggaaatgaactcgccgtcgatgtagatagccttgtgtacggtgacttcgcggaatgggatgccggtgagctggccgatgactggcgagcggaatcgcagaagtgcgttgtggcgctccttattctccggcgtcgccgcgtcgatgatttgggcttgaggaaagcgatgcgcggcgatcagtccggcgagtccggcgcccacgatgataactttctgatcaggaatcatgatgtgtcccttatgagtgtacaaaacttgagaggataaaaaagggacccattttcatgagtcccttgaagagctagacgattcaggctcagaggagcggcggcttactcctcctcgccttcggaaccatcggcgccctgatcttcaccgtcgtgctcctggccttcgtcatcggccttctcgtcatcgccctggccagcttcgtcttccttcgaagcgatggcaaccagatcgacccagcccatgatttccagcttgctcaggtagctgcggacagaggtgccatagagcagatgggccaccttctcgccgaaggcttcgatttcgaccggctcaccaacggtgcagtgctcgttgatgtaagcgaacaccttgccgcgagtcgagaaggcctgcggagtgccatggccgtcgccggtcgggatgaagtgggtggcgcgggggcgacgcgagccattggacttcaggtcttcgcggcgggcttcggccttcttacggcgctcttcctgctcttccttgcggcgctgcttctcggcttcgcgctctgccttcttctgctcggccaggcgcttgcgctcttcttcgcgtgcggctttctgggcttcctgggcggccttcttctcttcggcctttttggctcgctcggcttctttctcggccttcttctgctcgcgctcggcttccttggccttcgccttctcggcctgctcggcttccttcgccttggccttttcagcgcgctcggcttccttggcggcggccttttccttcgccttctcggcgcgctcggcttctttcttctcgcgctcggctttgcgcttctcttcgcgctcggctttcttctgctcggcttccttggccttggcttcggccttctcggcgcgctcgcgctctttacgttggcgctcagcggccttctcggccttgcgcagggcagcggcttgttccttggtcagctcttcgccttgggtctgttcgttctggtccttctgttccatgttcttactccgggaatgtttaaagggatggcttattggcctgtgaggggattatctctaaactaattgaagaagggaatacccttagcctgaactttcctaaatattttctttcgggaaagtccaaactctagggaacttatttatgttcgagaagttcctagcttttacgcaagaacagtaagtattcgattgcgcgagttatcccagtatacatcaactgactataagggatggacggcaagttttcttctaacatggcaacccgtttccattctgaaccctgcgacttgtggaacgtcatcgcccagccgaagtcgaatccgccaatagccttctgcgcctccagccgcacgtcttcctcggccgaaaagctcaaaggattgaacttcacccagcgctcatagttcgtgccgataatgcgaactttggcgaacaacatttcgtccggctcgtcatcatcctcttggccttcggggaccggcttgagttcgagcaggatggcttgctcgccgttcataatgccgtattcatgctggttcccagtacacaccagcttctcgccaatttccggttgtacacccttgtagccgaggatgcggcgcgccctggcgttcaaacggcgacgagtattgttgtaggcgcaaaggatcacgccgtcatcgtccaagaacgtccgcatttcgtcgtccgacatgtcgaatccggcccgtaccagaatgtcgtcatactcgcggcagggtaggcgcttgccctggcggacgaacatcgacgcccgaacgatattgccggcgttgcgctcgatttcggtcatgatggtgtcacagctgttctcatggaaaatctggacgccgcgcacaggaggaacttggccaaagtcgccaatctccagaaccggaattcggtgcgacagcaagcgctcttcatcccactcgccgatcatggacgactcgtcgagcacgaccaacttcggcttctcgtcgagcgagtctttgttggcaaacatgatttcgccgtcttcatcttcgccaatcggccgatagatgaagctgtggagggtccgggcattggtgcagcccttctcgcgaagccgcgctgctgctttcccggttggcgcgacgaagaccgtccagtccatcgagcagcaaagttcggcgatgatcttcgcgatggaagtcttaccagttccggcgaaaccagcgagtcgatagacctggcggcggtgcgctcgatcacaccaaccgcgataccagtccacaacggaattgatcgcgtcgatctgctgactgtttggtcgaaagccgaatcgctcttcgatctgatcgacggtgaagttagatgctgacatatttgcgttctccaacgctaggtttaattgaatcgaggctcagtttaagcacgccgtccacagaccagccagtatcacgacgatacttgcggccttgaggatcgacatagaagttcttcgtgcgccgcagcagaacataatgccaagcagctccaagcgcgtggacccttcctttatacgggaaagccttcgcctgctctgcggcctctttggccccagggagccagcggacggtcgaaaggaccaggaccgcacccttaatagcctgggaagcggcgcggccgtcctgtgggctatagcgatgtctatcgaagtctacccagtggtggttgccgcgccggagcttgaccgttcgggatcgcccctcgaacaccaccgtgccttcgtgagtaaaaatatgttccgccatcgaatgttcctttataacgtacagttatgctttacctctgcgcaggaagagtatactatcagctgactcgccaaagcgagcgaatttaatccaactttacttcggcaggaaagtggccgatactagcgccgccgcctgtactgccctccaaaacagaggatacattaaatgcaagaatgcaagatttcccgcgaccaactcccggtcggtaatccgaatcccaatgtcgacaagacccgcgacccgaacctgaagcccggtttcctgcgccgcagccgcgagctggacccggcgctggcagttcgcattcgtcgcgagctgatccacgccgaagcgtccgacttggccaaggccggatgggtcaattcacagtccagcctctatggatcgaaagccttcccgcgccattccgtcgttcgcgttaccggagttccggaagatggagctttcatcggcatgctgatcggcttcatcgagcaccgcgagcatggcgaatgggcggtcatggaagccggaacgaaagaaggcggcgccgtcatcattccagtcgatcacatcatgcgagcgtcattcgccgaagcggaagagttcgctgaaaagtgggagcggaaccttggctggcgtctcctgcgccagcttcgcgagtgcggcgccctggccgggactgaagacgagttcctgcggcggatcattaatcgatacgttcgtgatcgcacgatcctcgatcaccacaaagtcggcgcggacaaaatctatactgatgcagtgctcaagagcatcggcgaaacatggccgaaaattccttctgggaaattcgtcggacaccgagtcgcgcaactcctgatcgaccacaagctaggtcgagcggggaccatcctgaatgacctggtggacttcctggagaagttcgcggccgggcgcgataaagttctcaacatcgccatctgtaattgaggtgaatgatatggaagatttgggaaagctgagtccaaagctgagtcctcggcagcatgccgttctactggaaatgtacaggcatcctgagcatccagttcacagatcgccaacgaatttgactcttaaggctttgagacgaaaaggggcttgtcgagctatcatggaaggattccgtggctggatatatgttcggtcgccaaccttgctggaacataactgatgccggcagaaggcgaatcctgggagtgctggggaataatatggaaaaagaacaaagcgaagatcgcccaagcatccctgagtttgagaagaccgacgccaacaaactctatgatgctctggagacgatttcgctgctggagaagaagttggacgaatccgaaaagcgcgggagcgagctggccgcgagctattgtgacggcgtagtcggcgatgaatacggccatacttattgtcgttataaagtggaacgcgacgccgccttggccgaagtcgagcgcctgcgagaatcaaaaggcgatccctctggcagcttcgaccgttgtatgaagatgatgtacgagcgcgacgagaatgcaaaacgactcgacgccgccttggccagggtcgcggagctggaagggaagttgacggactgggtgcacgaagggttccggctcaacgaggcgctagcggtcgccaaggctcaacccagcgtgccggaggggtggaagctcgtaccgatggacccgacatcacagatgacctctgtcggtcagtccctgcgttatgacgcggcaaacagcatcggcgagatttaccggcaaatgctcgccgtagcgccctcacccatcaatccggccgcgcatcctcagccgtgccagcaaccacaggcccatcctgcccgctgcgggtgcgagcggtaagtgccaagcaaggagttcatgtaatggaacagcagaaaccttcggaagtagatggagccatcgccatgaccgatctcgatattcgcatccttcgaaaggcgaagcccgaagcgcaggacgagtgcgccgtgtccatgttcgcagcagcgatccgccagaaactgcagcgctcccgcgataaaggccgaggcggctggatcgactgcgacgaagatattctgatcaacggattcgccgaacatgcgctgaagggaaatgagaacaacctcctggacctggcgacgttcctgatgttcatgtgggtgcgcggcatcgacgatgcgaagattcccccggcgctcgaaaaggcgagacagcacaagatcatggaagcctggagtcgaattcatgaagatggcctaaactccgccagaaaggcgagtgctgcgcgacagttcgttggagtacctcgccgcaaaggaagaccggagcgacttgcatgaagcctcacgaaataagactggctcaggccgaagaattcctgcgagaactcggcagagggattccggacgacgaacgggtgatggtcggctacgctgaagaagccacagtccagaccgacgagaacggccgcaagctcaacgccggctggtggcctgtgccctggaaggaagggaaatacatcaactcccgatccaacgcctacgcctgtatatcgtcgtccatcaagacgcccaacccgaagacaggccagatgcggtactggcgcggcgaagcctctttcggccacggcctggcgttgatggtcgatgacatcggctccggcaaagggtccaaaggcgacttcgaccgcgacgagttccgcgagcgactagagccgaccgcgattgtggagacttcgccgaacaactaccagttctggtatttcttcaaagagccgatgtcccacatgctccagttcaaggcgttgctctattcgttcgtggaccaggtgctaaagaaaggcggcgacaacacagtcaaggacgtcagccgttacggccggatgcccttcggcttcaacaacaagcgcgggaaagacggcaagttcaaatatgccgacgaaaacggcaagcccgaactcgtgcgcctgtacagcgccgactattccaagcgctactcgccggaagagatcgcccaggcctttggcgtccgcatcatcatgccacagatgaagaaggtggagataaaccgcgacgattgggtgtatgaccaagtatggctgaagtatgccgagcacatctgcacgaaatacaagatgggcgaagcggcaggcggccaggtccagcagaatatgtccggcaaataccgcatccgctgtccatggggcgacgagcacaccaacggcgatcctttcggcgcctactttcgcgggccgatccctggagctgagcacgaatatgtattcggctgcggccacgatacttgccgcaaagagcatcgtcggacgtgggcggccttcacggatgaagtcgtgctaccctatatcgtcgaacaattggaaagaatcaaccgccgtcacatcggtgaggagtagacaatatgcaaaacgatcctggaatcctgatcacagccatcggcttgctgttcctcggccttatcatcttcttcgaaggcctaaagggatggaaaatacaagtcgcaaacttcctcgcgtcgcttctgtgcttcttcttcggcctttctgctttgacgttctggttcgtcgttgcgtttgacgtattttaatcgacgaacggtacagaaattttcggatggggacggaacttattagctatgccggtttaggtaggagataatagccgtccctttcgcctcaatgtgtagaggcaatgttgaatccgatcatgtaaagcagaaggcggcaaacctaacatgattatcgacgaagataatatttttgatgatggcgaatcagggtccagtgagtttgatctcacgcagatagaagatgctggaatggaccctttgatgaccgccgcgagcaaggcggccgatgatgcgattgcgaggaacgaaacgcatcgcgcgcaaaaggcggcaagatacgccgaggcgtatgctgaaccagacttgaggaagcgagcgcggttgttgatgctcgaccaggcgttcgatcttccggtcagccgggtggtgaaagggccgttcgatgacttcatcacgaaatacagctcgacgtcagacagcaactacctcgcggtctatgatacgttgttctgtaagggcgacggaaccgtcccacacccgcacttcgacgagtttcgcggccggctggtggaccaccgaggcgtggcgttcaacaacaagaccctcgaccccattgacctgatgggcgccctcgcggctgcggccttggacgatccatcgattaagaagacgattgagacttgctgcgtttgggcgcgtcgatatcgccgcaactctttgatcgagacgtttgagaagaagataccggattgggacggcgaagagcgaattagcacgttgctgatcgatcttttcaagccgttcgacaccgagctcaaccgtatggtgagcaagtatttctggctgagcctgtactgccgcatcaactatccgggaatttcggcgccgatctcgttggcgttgattggtgggcaggatgcggggaaatcatatttcggcttgctgatctgtaaggaactgtccggtgggcgcgatctggctccagttcagctcgacctgagccgacacgaccagacgccgttcctgcgcaacatcaccggcaactcggttattgcgaacgtcggggaaatgtccggcttcaaaaagggcgacatggaacgcatcaaagaattcctggtgcgatcttcggatacattcgatcaaaaattcgagccgggcgaaacgatcaagcgacaatggatcaccatcatggacggcaacggatacgatggactccagcgggacgactccggcaaccgtcgattctatccgatgttcgtggcacaacttcccgacgaagatggaaagccgaactgggttaagccgggcgatggtaatgaaccgttcaaggtggacttcacagacttcggccgcaagttctggcaggctatggctgagtgccgcgcctggatcgaagagcatggcgtcgatggatacctgaatatggtgtcggaagctaaccgcgaagtgcagaacttctctatttcggaaatggagaatgcgcgtggcgtggttcgtgatgatacgattgacatgtatctgatcaacgttctgataagttgcgagttcgaagagatcaagccgggcaagaattccaagaatcctgggtggagggctgacaccgtcaccattctgaaatggttcgatattctcgccaggaagaagccgatttctcgccacttaactccgcacctgaaggcgctggggttcgtcccgaacaagaacggcctggctggttggtgcctgcccgtcgataaggttgcacctggatggacgaatagtatgcaaaccacgctgccgccgttcaatgatgcgcttgtgtacttgctgaggaagggcgacccggatatcactgatgaggccgccatggcaaagattcgggcagtccgggccgagcgagccaagattttgggcgaggatttctgatgtagtggttgagtgtacttggactaggccgccttcgggcggtcttttctttggtgcggcgtacattagattccggcgttgggcgggattggtggaagtgaatacagtaatttggaccagtttcgagcgcgaataatggaaagtcgatagattttccgtatcggtttagcgtgtatggtggctggattttgcgtgaaatgttgagaaattgcgtgtttgaggtggtcttttcgtgggaaatagccgcaaattactgtatagcgattctgagcggtaatttgggaagcctactgccgcgtgggttagcgggccaatttcctaatttccggtttttcgagcatgggttaaaactattctacagcgaaaatcgattgcacaatcctaatagaaaaaatctatcacggacgttacctatctttaaaattaattaaattaatggtaatttggtaatttggtatactttagtatttgaaagcctcgcggcactaagctcgtacatatcccgtcaagtttccgattccagccagctcgcggcagggtcgccggaaacttccggacttccaatccatgggtcgcggcaacaccacggcggactaagcggcaggcaccaaaactcgacgaacggaaccggaaatttgggagcgcgacagaatcgctcagctggacatatttctaacattcgatttaacactcctctcaaacactcaccgccatcgtccccgccaaccgccgactcgatcctcacccaccagcggatcgcccgtataacatcctataacaccacctaacactcattcatcatcaaacccacccagacctacagcccacccacaagcagcccatagacgagatcccttgccccatagtacaatcgcgccatactcagtgtcgcggcagagcaccaggcccatccaccaccaacgccaccgcgacgactccagaatcgaactcagggacgcagcaccaaatgaccaaattctacagccccgacgatctagtcacgccacaggaattcgcagacccgcatttcgcgtcgatcaaccaaaagcgattcgacctgtacatcgacctgcgcgtccaaggttacagctcctggcgggtcttccgggccatctggggcgaggagcatatggacggtcccgcgcaggcccgcatcttcgcgatggagtccaacccgtactatcgcaagcagttcaaggccaagttgaacgcgaccaaaacgtccgatttgtggaatccaaagacggcgctccacgaactcctccaaatggttcgtgacccaaccgtcaaggactccagccgtctgtcggccatcaaggaattgaacgttctggctgaaatcacgttcgtggacgagtctggcaagaccaggatcggtcgcggtttggccgacttctacgcatcagaagccgaggctcagaccgcgaccgtcgctgctgcggccgaagccaatggctatgttccggaaggcgaagagggcgatttcccgtccccgacgccggaaccgaccgaggaagatcgcgccaaccccatttagacataaaataacatcgttctaggcccgaatcggaccgaactaaggcgacggtagcgggaagggacgaaaacgattctagggcggttctaggaagtcggagcctaaccctcagaaacgacaaagccccggactctagctcagaatccggggctttctttttgggcgccttattcgccagcttcgatgatttcgaagttgtatttgacgccttcgtgctcgaaagtcatcttgccagccgccttcagctgcatgcggaagcggatgtgtttcgaagaaggcaggccgaactcgatgaatgctgcgttggtggaccggaactcgccgcgcttgcctttgacggttacagccacgccatggcgctgggtgcgtttcttggaaacttccgggtctttccaggagttggcgatggctgccgacaggtctttggactctttggctttctccggagcgttcttggcctcttcgcgcatcttccggatttcttccagcgcttcctcttcggtgatctcttcttcaggcttcagattctcttcctcggccttctcttccttcttcttggaagtgcgggttttgtaaacctttgccggggcttcctcttcctggaaggcttcttcctcggccggcagagcattcaggatggcgaggcagcgacgctcagcagtcttgcggtcagagaaacgcttgacagtcgcatcggcgttgtgggcgttgtagaaggcgaccagttctttcatttctgcgttctggatgtcgccgaaggttttgatggagttggtcattttgcgatcctctgttttggaagatttcgtttgggcttcagtttgtcgcccgttgaaagagattatgcctaggtcgatgctgcgtgtctacatttatttagcagaatgatggtgaacccgacgaacggtcgtcggatgtgaaaacaccgcaggacgggctgcggtgtttttgtgggcgttggggtgatggtcagaaagtcggaactgtgataggctcgatgggcggatcgccgggcctgtcgttgtccgatgcgggcgccgggctggaagggatcgcacccgaccgaagcgccagcgattccgactgtctgcttacctgcggtggcggtggagccgctggtgcctttggagggattggaggcaggtcatttcgacccttgaccatttgcagagggtctggaagatcgggaagcgcgccagcgatttcgccatacgtccgcgccggatcgtcgccgaacatttcggcggatcggttatctttgacgatctggctgatggccgtcacatcgccgcccggctctgccggatcgacgccaacgaatggcctggtgacgcagcgcatgttcggatagttcggcagattgttcaggacgatggagtccgcccagacatacgggtttttgtggttgccgggtccgtggctgatgatctcggcaggaatatggccgttcatggtgagccattccgccatcccttgccgagtcagcgggcttaccacgatctggccagtagactcttcggcgacggcgaacagatcaccgagcttgaacccgatgattatgtagttggacctggactcgccgacgaaagccagggtttcgatgttgtggtggatatcttgatcttcccagatgtacagcatggcgttactcctctttggcgaaattgttctttcgaaggtagtaggcgatcttcagtcgcggccagaacggcgtcagcgccacgttgtcgtgacggatgatcgcaaagtggtccgttccttccaaccctgcgatgaagcagcgttcccaggcgctcccgctgtagcgatcatctggcttccagacgttcatgcctgagcttagttcgctcgactcccatttatgatcgatcttgacgttcctcatggcgccctcaataaggctgcttgttgtgttcgaccagagacataccggccggaactttgaagcggacgtattcgatcatcatcgccgttcgacgccgattcgtgccagactcgtcattaacgaagagttcgcactgatgcgggatgactcgcgtcaccaggtcttcgcctttcgaaccgtagaacttgatgtaggctgcgacgcctcgcgtcatgctcagatggatcgtttcgcagagtcgctgcgcggccgacgcgctggacagatcggtcggactgaccgtcacccagtaatggccactttgttctttatcggacataaactgccctccaatgagaaagcctctgccgagccgcagaggctggttgttgttagtcgcgcttcaacagaacgactttgtcatatgcgcgatatttaccgcgccagtcttcccagtagtcgccggccgggcaggtaagctccagggtgatttcgtcgcgccagcattcgacagaaagtacaatcgccttgttccttgctgcaccctctgcggcatctgctctgagcttaatcagaatttcgtcgccagttttcagctcatcaactctcacaactttggccatgacacactcctgtttgaagaggcgcggccggaaccaacccagccgcgccgatggattaacgtttgtgaagtatggacactgcgtccacgtcgaggatgctgatggtacggcgacggcgcggattgctgcgttcatggatgcgaatcaggttcgcagctggagctttgtccaccacccatacatcttccggcttctgcttccggagcaggaccgtcacttctgcgttctgggcgaggccgttgcagatgaacgtgaacttggacgagggagttctgtacatgtcgagattcctttttggacttcgggtccggcttttcagtcggtgaagagattatgcctgatcatcaccgtcgagtaaagcacttatggaccaattctccagttaaatggaaccacagcgcggtatcgctgatcgctacgctcccacgccatggcccttcttgctcgcacactgcgaaccacaggctgatttccatccttgccaggactcggccgaaagattcgaacctgcgccgactggacaggatgtcgacattcactcgtcgattgacctcataccggcgaccgttgatgacgaagaccagccgcagggtttgtccgtcaagacactcccagtatctggtttcataccgaagccagtagcgctttccagccgggcctaccatggtcatttaatcgatgctcctggccgcgccacgcggtccggtcggcggcgcaggatcgaaccgccccaggatgtagtcgggccggcgcgcttcctgaggacacacggcgagaaggcgccatcctgcgtccagggcgtactggagttcgtccgtgcagcagtcttccttgagcagcagacggttgacgctctggagattcggaccagggatggccgagctggtgtgcgagttccaaccttcgatgccgtccaccatctgtggttggttgatgtagccttcggacctgccagccaaccggctcgcggccagctccaggcgctccagcattggccgcaaagcggcttccgggtcaacatcgtcccagagaaggaccaagctgatgatggtgtacggatagtccttgtccagatcccaggccgaagcggtcagacggcccaggccgatttcattacacataacgggaacgtcgttgctccatgtggacggctcccagttccgctcaccaggattcccgattgttacgccttccaggttccccaggagaacgtggagcttgctgacatattccgcctccaaggctttccgctcttcgtcggtctggttgtggcgatagaaggatggagggctgacttttgcatggtagagtttcatggcggttcctcggtttttgaaggcttgaacgttagaaaatggtgtcgcagtatttctcgaaaggactctggcgcttcttctcgcagatcgcgcaggtgatttccaggtcgggcagctcgctgtaagtcttgccgagatacagccagcgcttgcacagactgcggccgtccgacgtgaagaagtggactttgcgagcattgccgggttgcgcccagccaccttgatcgtttttgcgcttgctcatggcgatatttcctttggatttggaatccatgccgtccgttcgctcacccaaactccgtctacatagatcaggactgacagagcagtcgcgccaaacccgaagcctacatagaatgaaccgggatcgatttccatggtggcgctattggtggcgctattggtggcgctattgaaatcgacttcaaagtcgaacatcgaatggccactcataccatcaccatgtcgatttcattgatgaagaaatgaacatcgacaccatcggcgcgaccggtgtaacgcagccgagtcgtcccatcaatgtgggcttcctcgacgccgatgacttccaggatggtgtcgttgcagtaaagcttgacgaacatcttgatgccggagccaatcgccgcgaaggcgatctgcttgtacaggtcttgcttgatcatgctttacgctcctgtttgcgtatgtattctgccctggcttcggcttcgagcttcgcccaaagcgcgttgtcgactggaccccagggaccggtctgagttccgtccaccggtgcgaacttgccaccggcgcgacgatacttggacagagttctcaggccgatgattttctcttcttgggagtcgagttggacgatcatttgacatacttcccgaagtagcaggtgtggaggatttccatacccttggagatagccttcagcttgataccgaaattcttgatcgcccagtccagatcgtggtgatagaactcgatgatgttgacgatttgaccggcgctgtagtggatgacgcgaatcttaccattccagcggaaatcttcgcggctgtttacggcctcgacttcgatggtgtcgtttctgccgatggtccatttggagctagtcatgtcgcaatcctctttttggagtgtttcgcgtttcgatgaggtaactatacctcagtcacctcatcgagtaaagcactttcgaacagattatctgaaatttctggaagacagatccatcggctgattcagtcagtggaaccgagactccatccgttgcgggcgaaggccgagcgaccagacagcttgcggcactggatggagctgccatcgtcgaaggtgtaggatacggcccagtccaggcgctcgcgacgtactgccgcagcagcgatatcttccagacgggctttgagaagttgttctgctttggtcatttcgagttcctctttggagcgcttcgggtttcgatgagatgactatacctcagtcatctcatcgagtaaagcacttctgaggaattatctgaagtttctggaggccagaaattgccgccagagccagtcaacgtgatcgttgagatagcgctcgccatcgtacgacagagccaggcatccatcctttatgccgagtttggagccggaaatccattcgaactcgaactggagcgttcctgggcgagggatatgggacaggttgtacttttgcacggtcagtagtcctcgaaaggattcatgttggctatggccgcgactttctgcatgccgatgcgatagaattcggcctcttccctggccttgaccatctgctccctggcttcgcacgccagcttgtgctgattgttggcgttctggatgcttccgtccagactcctatccagttcttcccgaagagccttctgcgacgctagctcggcctccaaatcctggattctgatctgaagctggcgattcctttcagaagtctcgttttcgcgggcgatggagttctgaaggcattcgtcaagacgagtattttcgcgcacaagctgatgcttttcgactttcgcctttcggcatgtctctcgcatcgctgaaagctcactggcgtgcaaatcagcgtccgggtctttacgctcttccttcgactccatccgcaggtagtactggccggctgcgaaggcgagcactgcctggtcggcatgctttacggcttcacccatgtagtgggtttcgtagcgaggccgaaacttacactcatctgcgtcccatagcagactatcggcaataggccagaatttgcggaagccatcaggatcgacttctacattgaccatttgcagctggccggcctccacttcgacttccagaggaacctgaatggtgccggtgatgtactggaagtacactatgctagacataacacaatcctcataagaagtcgcggccgggaccatcccagccgcatcgtaatcactcttcgccttcgtccgcgctcagccactcttcgaaggcgaaattcaccttcgactcgacccaatcctgcagctcatcggcgaactcgtcactgtcgatgtccatggtgattcccataacttccatgttccatagcgcggcgttcagttcaaactgcaccatctgctcgccatcgacttccagcaggatgcggtctgcgacttcatagtcgtctacatcgaacagatggccgcccgccaggaggtgctgtacgaaagcttcatcgaggttggtgacttcgatctggacttgtttggtcattttcgtatccttacttagcggctttgaattgggctttgaggttggccagttcagctttcagatcgatcatcgcctgaccgcgcaggccttccatttcggcctcgctgatcgcgatcttggctgcgcggattttgtcgttgatttgatctttagtcattttcggcttccttttgtttgaagggttttgcgtttcaatgaggagattatgccgaaagtcagaatggaagtaaagcatcttgatgagaaaatttctgcccaccgacgaacggtcgtgctcgaccgtcgatggagggtgtgcataatcgaagtcgcacgacgcgaccggtgatgccccggcgaaccggggcggggttgttaggcggtgcgctcggcggcgcgttctgcgttacggtcgtgcgccatgcgcgcccatactgcggcccagcgcgctttatcggcagagttcggcttgtacacgtcgtcagggtgcggttccgggccgtaggcgttgcagctttcgtcgtattcgtaggtcatcatcttgccctcaaggggtcatggcccggcgaaccgggcgggtgattacttgcgatatttcttaatcaggtcgtgtgccatggcgatggcatcagaataggtttctccgccggcctccatttccttcacagccttattgcgcagtgcgttcagcttgttgccgttgatggtgcctttttcatccttggcagcttcgcaggagtcgcgcagagtcttcagggcttggtaggtggcgttcatcgtcttgttctccgggtttcgcgtttcgatgaggagattatgccgatagtcagaatggaagtaaagtgtctgaatgaagaaatttctgaacaccgacgaacggttgtgctcgaccgtctgctgcggtgtcgatatactcggcctattgcgaacaatggactgattaaatgtacaaactcaatcctgcgctgcgagcggtctggcgaactcgcgcccgttacaaagtcatctatggaggccgggcgtcttcgaagtcgcacgacgctggcggtatagccgttttcctcgcggccaactacaggctcaagttcctctgtgctcgccagtttcagaaccgcatcagcgaatcggtctacacgttgatcaaggacaaaattgagaattcagagtacaacggcgagttcatcttcaccaagaactctatcaagcacaagaggaccgggtcagagttcctattctatgggatcgcccgtaacctgtcggaaatcaagtccaccgaaggtatcgacattctctggcttgaggaagctcactacctgacccaggagcaatgggaagttatcgagccgaccatccggaaagaaaactctgaaatctggatcatcttcaaccctaacgaagtcaccgatttcgtgtatcagaacttcgtggtcaaacccccgaaagactcctgcgtcaagatgatcaactggaacgaaaatccgttcctcagtgagacgatgctcaaagtgattcacgaagcttatgagcgcgaccgggagcaggccgagcacatttatggcgggattccgaagactggtggcgacaaatccgtcatcaacctcaagttcatcctcgcggccatcgacgcccacaagaaactcggctgggagccagccgggtcgaagcgcatcggcttcgacgttgcggacgacggcgaggatgcgaacgccacgactctcatgcacggcaacgtcatcatggaagtggacgaatgggacggcctggaagatgaactgctcaagtcgtccagtcgcgtatacaatctggcgaagatgaaaggcgcctcggtcacttatgactccatcggcgtcggtgctcacgtcggttcgaagttcgccgagttgaacgatgccagccccgacttcaaacttatctatgatccattcaacgcgggcggcgctgtcgataagcctgatgatgtctacatgaagctgccgcacacgacgatcaagaacaaagaccacttcagcaacatcaaggcgcagaagtgggaagaagtcgcgacccgattcaggaagacttatgaagcggttgaacatggaaaggtttatccattcgacgaattgatttcgatcaactctgaaacgattcacccggacaaactaaatcaattgtgtattgaactttcgtcgccgcgcaaagacctggacatgaacggccggttcaaagtcgagtccaagaaggatatgcgcgagaaacgcaagatcaagtcaccgaacatcgctgactcggtgattatgtcggccattctgccgatccggaagcccaaaggcttcttcgacttctaaacatagaaaagcccggatcgctccgggcttcgggtcttactcggtatggttcctggcgctgagtgtcgatgcaacggcctcgccgactcccagggcttcctggccggccgcgagcgcttcggcttccgactcgacgatgaaatcatcaccttggccatcgcctggcggaacctcgaccagcacggcttcttcgccttcgaaccgcaggtcataggtcttttcgacggacagaccgtaacgagcgttgagcgcgtcccagagctgggcctcataggtccgcaggtcttgcagagctttctggtggctgagcatggccatgtcaacggcccgttgcagggtttcgtccaggacgttgaaccgaatgcgaagagaacgaatccgctcgacgacttccgcatccactacatgtctttcgatcattacttttcacctttgctgaatgtaacgttgtagccgttgtcggccaggtaggtcagggcgccttcgaaggaagttccgacgaggtgctttagcttcatttcgcgttgcgcggccagccagaatgccgttccggagaactcggcgcgcccctcggccaagacccttccatcaggcccggcgatacgtacatggacggaagatagcttgatcggcatcagtgaatacctccactggcttgcgacggcatgctttcggcgcgcgcggcttcgcagtccgggcagggacatgcttggcggacgcgctccagctcgtcggcatccatgacatagagcttcccatcggcagtgtcgtgcgccatggcgatgttcgggaagtcggtggcgctcaggccggcgacagcgcggatttcgtcccaaagcaccagatgctcggcattcagtcgggcggcgagcgcttcgtgctctttagcgacgcgcgccatgaactcgtccatccggaatgcgaattccgcatcgatggcacgggccgaggccatggagctgagtcgaatcggttctttcttcatgatgattctcttttggttggtggttgctaatgtccatgcagattcaaggccggctcaacgcggcgaagaacaacacgatgaagaggagcgaaaagaatgcgaacgccagagatattccggaaatcagctttgccataccctgcatctcagtcgccttggcagcgagtctggccttagcctcgataacttccggtcgtggcgaatgaacatattctaaggcctcttcccgcgctttttcggcctcgaccaacctagggtcgcgggccgagacttcgctgtgccctggcctcgcgggatgggcttgcagcgatggagggagttcagccgccacgactccatagtctgcgcaggcccaagcgatcccgatgaggatcgcgaggatggattggacgattcgcagcatcactttgtcgctagggaagttcatgatcaatcctccaccgaccgaacgatttccatgttacgcccggcattggtccctgcattgaaggcgcgccgaccttcgctatcgtccagacgcatgagcttggtgacatccgacttctcgtagccaggatcgccgaaatgttcgtgaaccgcagcttccttcaccacaaccagagacgttccggcagaagataccagctccatacgcttcctggtgatggactgaaggcgatagctgatttcctgggtcgcggccagtttgaattgcgcggcaacctttacgttgaaacgttcgtacccttgagccttctgatactcccgacacagacgatcaatggcctcgaccagggagttgaacatgttcaccgccagctcaacgtccgacttgtagcctttgaagcgtacggcatgaccccagcgcttggtagtgcttccgtcgcgggcgctcctggatgccttagccgatgctctgtggttgttgatgccaccggcgaaatccatgatgcagtcattgtacgtcgccacggccactgagaaaaacttcatccagttcgggattgcggaatagtaacgagtggcaatttgctcatcgaactcttcgcgaatctcgccggtcgcttcgaagtcgtgaaggtcatatttgtccttcaacttcttcacacgctcggctgcgatggccgcttcgtgcggactggaagagtcggctgccatggcggtcagtttgcggatgcggtctttcgccttctcgatggcttccggggtgaattcgttctggtcggtcatggtcggttccttgtgtctgaagggtttcgcttttcaatggagctattctgccttcattcagaatggaagtaaagcaatttcttccactatttcggcatcgactggaagaaattccagatccaatcacctgctaccagcaagaggatgagggcggcaaagaacaagacagcggccgcgagctgtgcgcccggcttcagtttgggatggctgagcttgggctctacgggaacggccggagcgctagcgctgcaaccggcgtctcctgggccgtagccgatgccgcgttcacacgcctggagcgacaccagggatttaagatactcggtctgcttttgcgactcttcgtagatgccggcgacggcgaaccagagggcgaacactacggacgtacacacaacccaggcgccggtcagcaggagggccagcgggccgatgacgaagacggtagcagccaggacgattgcgccgccccagatgatgaagccggccagaccattagtgatgtcgacacagaactttttcattttcagattccttcggttacgggatggaggggatttgaaactctgcgccgccgagaacatcaatgacgacttcccagagcgtcggaacagaccactggtaacggtcgaagtcggtttcaggatcgacgcccagcgtcacataggaagtggcaggccatttatgaacactgcctttccgcatgagagtcgccacgcggccgtcaccgagcggattcgtcctgtgcggaacgtacgcagacatcgaatattgctgcccggcgtcgacaacaaatctttgcctctggcgcagacatacagagcccacaggattccagccgcgaccgccgcaagcctggcgagccgaagaatgctcataaccttcgtgagtcatttcgccgaggcaagccgagcgatcctcgtaatagttgatgttctccatcgatccaaccagcaccagagactcgaaatcgaatcgatgatcgtggatggccgagtgattgaagcaaagccgacgcggcagctccgggtgccaaacatggaggcgaccggccggaagttggacctgaatgaaccccaggccgtgcagagtgatcttgtccttcatcgggtcatggacggtgctcatggataatcctcagtagcagaaatgtattgtgagagttacgattgacaagccggtcgcccatagaagggcgaaccaggccatggctttgatggtcgtgtagatcatccgaagaattttccggcacagatcgggccaatgcccatttcgatggatgcgtggttggtcaactcgcgaccgcagcaggagcactgaccagtcttccgaccgtaggcgactgccgattccatcggcttttcgaacatcttcagaacgtcgtcgtgctcagtatcggtgcagtcgcgactcttgatgaatttgccattggtgatccggccgaggtagatgtcgcccaggacgtacaggctaccggcgttccggctgtgagcgctagcctctttcacaacaacgatgagcggctcctcgccttcgccagctaggcggattttcgggcgcttgataccagactctttcgccttctcaaacgctttctcgatgccggaaatgtcaagagtcggcgcagcagcttcctgcgcagccactttctcgcgatacttggcgaggctttcgatggcgcgcttcgcagcagcgatctgattttctgtcaaggagccgtatttatacaacgactcctgaaggctctgagcgaagctgaaggaatttccagtccaccactcgatgatgtccgggtgcgcggcttcgaaggccttaattttgaggtcgcgctcttgcgcagcgctacagattttctcgatgcgcttttctgccgccttagcacggctcttggcgcgctgctccgggctggttttgtactctttgtatccgacgccgccgcaggcaaagcaggcgcgaccataagacgaagggccacggtacaggccggtgcctgcgcatttggtgcacttgtcgcgatacagcttcacttccttccgggagttcgggcgggcacccatggacacgtcttccagggtcttcggcgcttcgttgttgatctctacggtagcgaagtcatcacccaggtcttcgaagccggtgaacagattctctgctgcgttcatgtcgattctcctgtttggaaagttcgtttcgatgagttgactatacgccagaaatggaaaaacggtagcgatttctcactaccgttcgtcgggtcgaagacaatcaataaatgtcgctattgatcttgaacccatgctcagcgccgtcgttgtagtcgtactcagcataactgtcgcagtagtcgttcaaatgctgaatgatgcctagaacgtcgttcgcggccttgtgccttttcgcggcgatggtcttggcgatgctgtcgccgacttccagggcttcggccgtccggcgatggatcagcaggcgactccaaagatagagccggacgcgacgaatgatgtcgcgatggcgctccagtcgtccgtgcaactcttcaatttcgtgctcgcgagatttcaatactcgtcgaagctgctgaacttccagttccaaatcggccttagtagccatgttcacctcaaaaaggaaaatcgtctgggactccaggaagttcgacgattattgttgagcctgatcgatccagaatgcatccgaccgagccggccctgtggggatagggtctacacgaactataacaggtgacttccctgactattcgccaggtcgatcctccacaccatctgcaaattggcgggcgcttcgacttcagttttcgttcgtccaggacggcgcgtctgtcgcaggaaaggcagcgtgccttaaccgacgtaaccatgggtattgtcgatcattcggatgagttcatcatcctctgattctctcgacttcagaccgcccaaagagtccgactggccgtcgcatttcgcatcgatatccatcgaagacaggaatcctgccgatactgcgatgatatcaactttgtcgccggccttcttgaagccttcgcactcagcatcgagggccacaattgcactcgcggccatgttcacatgactgatgaggtcggggaagatcacaggaacttcacgcgacatgccacggaccgtcagcttcaggactacatacttcatactcactatcccttttgtatgtgaggaaagaacttgctgttttccggatggtgaaaacgctcggtcgcaggcggtctttcttccggacattgaatcgtcgaaggcgggaaaaccgcgccggcgataatcgccgcgaggagtgcagcggatgtcgacatccagagggcggtttccaggctcacccgaacttccggacggcgcggcttcattcgctccaccctcttcccggttcataggatggtagactgccgccgcgaacccagttgtcccacatgtggtccagaccagtcggtggctggggcggcggactgtagaatccgggcgtctcagtgctgctcaggaaataaggcgtgcaaacggcctggacgaccaattggtgccgctcccacatcttatcaatcgctcttagcatgacgtcttcgcactgagccttactgtcgaaccgtctgctagtatggtccggcatctggacacagccgtctccagtgcaaaggaaagcagtagcaatccatacggtgatactcgccatttcgtcaccctctttagttgatgagcagagtctattccatctgctcgccaggagtaaagcgcttttcgtcgggataaatgccgatgatgtctgcgtcgagcatccaaatctccacggacggatcgtcgctgctgatttggtacaggttgtacagctcccgtccgccgacagcgcgctcgcctcgcggctcaaccgccagaaccttgccgtgcccttctccgtgctcgtccaggtatatgacgtgatcgccgacttcatagctttctttcgtgacgaggcgtgaacgcgagctgttctgcgattccaccacccaggaatccagcacgccgcctttcatgtcgcgaaacaatcttgccgatttgtcgcaatcgaacacgcccagaacttcgccgtctttcaacacgatatgtacgatgggcaaaagagtattcatgtttaatctccattggttgataattagagtctaatctgccgaaaagttcccgtaaagaattattttctcataactgattagttgcaactgttaatctgatgtatatgtttgaatctcttttgaacgtttgatgtttcccctataataagcgcacacagtcaacaaccacgtggaactacaatgtttaaactttcctggatattcgggcgcaaaaaggataatgctgcctgttcggaatcggcgccggagaaagtcgcacaaatccctcaacacgatccgctcgaccccatgatcaagctgggaaggattcgcggctggaacgtcgagccggagaaaaccccggtcattcgtagtgtgaaagatttcctggagccgggcctatctgtagcgatggatagtgtgtatggtgatggaccaactccggccgcgaaggctgctgcgggcggccagaatccctatgtcgtcccgactatgttgcaggactggtacaattcccaagggtttatcggataccaagcttgcgcaatcatttcccaacactggttggtggacaaagcttgttccatgtctggggaagacgcagcacggaacggatgggaactcaaatcggacggcaggaagctatccgatgaacaaagcgcgctgatcgcccggcgcgacatggagtttcgcgtcaaagacaaccttgtcgaactcaacagattcaagaacgttttcggcgttcgcatcgcgctgttcgttgtggagtctgacgatccggactactacgagaaaccgttcaatccggatggaatcacacccggctcctacaagggaatctcccagatcgatccatattgggcgatgccgcagctcactgccgactcgacggccgatccgtcttccgaacatttctatgagccggacttctggatcatcagcggtaagaaatatcaccgaagtcacctagtagtcgttcgcggaccgcagccgccagatatcctgaagcctacatacatcttcggcggcatcccgctcacccagaggatctatgagcgcgtgtatgcagcggaacggacggcgaacgaagccccgctgcttgccatgtcgaagcgaaccagcaccatccacgttgacgtggagaaggccatcgcgaacgaagaggccttcaacgctcgcctggcgttctggatcgccaaccgtgataaccacggcgtgaaagttctgggaattgacgaagacatggagcagttcgacacgaacctggccgacttcgacagcatcatcatgaaccaatatcagctggtcgcggccatcgccaagactccagccacgaagctcctcggcacttctccaaaaggattcaatgccactggtgagcacgaaacgatttcttatcacgaagaactggagtccattcaagagcacatattcgacccacttcttgaacgccactatttgcttctggcgaagtcggaagaaatcgatgtgcagctggaaatcgtctggaatcctgtggactccacgtccagccagcaacaagccgaattgaacaataagaaagccgcgaccgatgaaatctacatcaactctggcgttgtgtctccggatgaagttcgcgagcgtctgcgtgacgatccgcgttccggctacaaccgactcaccgacgatcaggcggaaaccgaaccgggcatgtctccggaaaacctggccgaattcgagaaggccggtgcacagtcggccaaggcgaaaggcgaagccgagcgagccgaagcccaggcgggcgccgtagagggcgcaggcggcccggttcccgccgctccacgcgggactaagcctctcgcgaaagcggccgaggaaggggccagcgaggccgctgaaccgccgtcgaggccggaccccaaggccgagctgcggaacttgttggtcgatcttttgtcgaagctccaagacctggacgacattaaggcgccggacggcgtagacatagagcacaatgatgcgcctggcttaaagcgcacatccaaacctggcgtgtctggtatggagccttcggtgttttcgtccaaccgcatcgtcgggcctcgtgatcattcggaactccagagaatcaaggtgaatggaataaccaccttgatcgaaaatccgcgcggaagcattcgacaaggcaaggatgggagttggcgagttcagatgaaacaccactacgggttcatcaagggaacgaaaggcgctgatggggatgaagtcgattgcttcgtcggtccgaatctgggatccaaacgggtcttcgtcgtcaaccaagtgaacaaggaaggtcagtttgacgagcacaagtgtatgctcggcttcaacaacatcaacgatgcgaagtctggatatctgtcctgcttccgtccgggctgggatggtctcggctccatccatgaagttgacctgcccgctttccgtcgctggctggcgaacggcgacaccaccaaaccattcgggggcgagtgatggcattcaaggcctccaaaaagcgcgagcgccgggcacctcttccagtcggaagagggaagcccataattccatcggcaggaatcgaggcctggtatcgaaagcagatgaaggatatgtccaagctcatgatctccgactatcgaaacgagattgagaaggcgctgtcccagcctgcggccgaacgtttcttcgccagagacgaatccgttaacgtcctgttcaagatgactcttcgaagcctacagcagcgatggagccgcatttttgaaggtttcgcggccaagatcgccccggagttcgtcaaccggaccgaagaagccgctaccgccgcgacccttcacagcttgtcggtggccggcgtcgatcagccacgagctgcgtataatgagagcgtcaggaacaccctggaggccgcaaccacttacaatcatactctcatcaccaagatccaagaggaagtccacgagaagatttacacatcagtaatgctgtctctgactgccccgaatccggaagagcaaggaacttccggcataactaacgcacttcgcaaagtcgggaagttttctgaagatcgaatcgaactcatcgcaagagatcaaacaagcaagctttacagttctctgagcgatgagagaatggcggaaaatggagtcgaggagttcgagtggctacactcttctgccggcaagactcctcgccacacccacctggagaaagatgggaagaggttcaagctgaatgaccccagactttgggagggtccgaaagcagaccaggggccgccaggatgggcgattaactgtagatgcagaaagataccagtcatttgacatcgataggagcgctatatgccgttagttcatggcacttccaatgaggctcgttctgaaaacatcaagcgggagatcgaagccggtaaagacccaaagcaggctgcggccatcgcttactccatccagcgcagtgagaaagggaagacggcgaaagattgttcgcctgagctcgttgccgatcttcgcgccctggtggacgctctgtcgaggctcgtgaaatgaaccgcaagacatgccggcgccgactcgtggtcgatgtaatcagggccaatattcacggcggattcttcagcctgaagtttgccgccatcgatttggcaatcatcggcgtcgccatcttgatgacttttggccgataatgctgagaaaatctggattctgactaaaaattctagtccggatagccgcaagttaccgtttacggaaaatagcagtaatttggaaagcctactgccgcgaggctttaacagagctagttcctaatttccgatttagccgcgtgcttcaaaagtatatagcctgggaaattagaagtaacgttccaatagaattcatctataagtaacgttataatataacgtcaatctatatgctctagacgtattgaaattcaatttttaattggtaaattggtaatttggattagtttaggagttgaaagtctcgcggcagtaggcttagacaaatcccgtaaagtttccgagaccaaattaccggattttcgcggctgaggaaactggtaattagatcataatacaaattataatgtaagttaacagtcgcggctacatctaattattgttccgcttatttacccttagatgtactgcgtatataatacagccatagtccacgactcttcgaattaacgatgacaaagtcgaaaagaaaaattgacgaaaatggatatatgaccatcgagggctgcccgatcagctcttatggcgttttccagtattctgctggtcaactcggtcttccgggcgatccgacgcggattgtcaacgtatatcgcccggagtctgccgtcagcgatcctgagtacatcgaatctctgaagaatctcccgttgatcgacgagcacgaaatgctgtcgggattcgacgacgatgacgacagcgtggcccccgaagacaaaggggtggagggcatcatcacctccaacgcttactacgaagccccatgggctcgcggcgatatccgcatctattcccgcaacatgcagaatcagctggaaaggggcaaagaagacctgtccctaggctatagttgccgctacactgagcaacccggcatctggaacgggacgccttatgaagtcgtccaggacaagatgcgcggcaaccacatcgccctggtaaaagagggtcgtgtgccgggggccagagtattggatggtctgtgttttgaccatctcagttttgatttcagaccatccgatgagggtaatgaaatgagtctcaagaaagccaagcggaagccccctgtccagcgcgtagggcaagctgctgactcggcggtcgaagagttgcgcaccctgtggccgaaactctctgcgtctgtccagaagttcctgggcgaagaagagcaggagccggagcatcaggaaggcgccgctccggccgaaccgaccgacagcgagcacctgaccgagcatccgactctggaaggcgcccagaaggacgacgaagagcaggaagaggagccttccgttgtcgatccggccgtggccgccgtcgagccggagcatcaagaaagcgccgcatccgaaatgtccggtgaaggcgaagtcgccgaactgatctctcaggtcaaagccattctggctcgactggagggaacggtagccgaaggggcagacgaagagcatggcgaaggtcaagatgtcgtcgagggtttggaggagcagagcagcctcagcggctcgcaaaccgccagcgacgatggtggtgagagcaaggataacagcgaggaacttcctgaaatggcacagaagaacgcgcaagatgctgcaattcgcggtctctatcgcgacattgctgctaaagatcgcctctacaagcgtcttagctccgtggttggtgcgttcgatcaccgagctatggactcggctgaagtcgctgtttacggcgtgaaaaagctgaacatcagctgcgcgaagggccaggaagctctggcgctcgacatgtacctgaaaggcgtcgaagcctcgcgcggcgcggccagccgtcaatcgaaagcccaggattcggccggttctgctccgcagtgcgccgagctggacagctacctgaagggggagtaactcatgttccagaaacaagtttaccgccagtacactcctggttttccgggcgatctgatcgaggacggcccgaagcgggcgcggccgggtcgaatcatgtctctgtctgccgtaaatccggctgccaccgccaccggccccaaccgcatcagtcgcgctttcggttacgccggtgacgtcagcgccctcggtgaaggtcagccgaagaccatcgcggctcgtgcttctgaagtcgtgatcggcggcgccaacttcttcggcgtcctcggccatccgaagcattatgccctgttcggttcggccggcgactccctggctcccagctatgatctgcccgatggcgccgaaggcgagttcttcgacatggccaccggcctggtcgtcgaaattttcaacggcgccgcagccgccctggacctggactatggtgacctggtcgcctatgtccccaacaacctggctaccgccgacaacgcgcttggcctgccggccggcgccctggttggcttcaagactggctccatgccgaccggcttggtccagattcccaacgcacgcatcgttaacgccatcagtctgccggcccagtcggcggggaatctggttgctggcgttaccatcgtccagctcacgcagtaaggaggcgtcatgagccagatcagcaagacccattcgcgcctcgcaggccgcaatgcgaaacctttcgacctgaagaacatcaccaatgatgccgtggcatctctgcgccgcatcggactggtattcgatcacgctgtcgtccaggaccagatcaaggccttggcgaaggccggcgcgttccgctccggctcggccatggacagcaacttcaccgccccggtgaccacgccgtccatcccgactcccatccagttcctgcagacctggttgcctggcttcgtgaaagtcatgaccgcagcgcggaagatcgacgaaatcatcggcatcgataccgttggctcctgggacgatcaagagatcgttcaaggcatcgtggagccggccggcactgcggtggaatacggcgaccataccaacatcccgctgaccagctggaatgccaacttcgaacgccgcaccatcgttcgtggcgagctgggcatgatggtgggtaccctggaagagggtcgcgcctcggccatccgtctgaacagcgccgaaaccaagcgccaacaggcggccatcggtctggaaatcttccgcaacgccatcggtttctacggctggcagagcggcctgggcaaccgcacctatggtttcctgaacgatcccaacctgccggcattccagaccccgccgagccagggctggtccactgccgactgggcaggcatcatcggcgacatccgcgaggccgttcgccagctgcgtattcagagccaagatcagatcgatccgaaggcggaaaagatcactctggccctggccaccagcaaggtggactacctgtcggtaaccacgccttacggcatttcggtttcggactggatcgaacagacctatccgaaaatgcggatcgtgtcggctccggaattgtccggcgtccagatgaaaaaccaagagccggaagatgctctggtgctcttcgtcgaagacgtgaacgcggccgtcgatggcagcaccgatggcggcagcgtgttcagccagctggtacagagcaagttcatcaccctgggtgtcgaaaagcgggcgaagtcgtacgtggaagacttctccaacggcaccgccggtgcgctgtgcaagcgtccgtgggctgtggtgcgctacctcggcatctaacagatgcctattcaccaaaggccgggcttccggcctttgttcactctgactctaactcggttgtaggggccggttagggcataattcctaggactacgccaatgactgtttatatcgtttcctccatgactcaatcggtgtcttacaatgcgtatgacacctctgatccgtccaatcctcgcctccagcgaaagattctgattcgcggccgcgcaggcatcgcatccgaaacttccggcttcggcgacatgatttccgacgaggctgggcgtccgatctggaccccacagggcgattgcactgccgtgagcgattcggatttcgagctgcttcaggccaataagattttcatgcgtcacatggataagggctatttgcgagtcgtgaagaccgacatcaccagcgaccaccagcggatttccaaagagactcgtaccatggagcgcgatggattccagcctctggatgctactcgcctgcagcagaaaatcaaggtgaccacagccagcgcttcccaggaacaagagttccggatttaaccgagggtttcggcatggtgattttcgacgaaaataagtttcgcacgctgtttccggagtttgctgatccagccgcttatccggacgtgcgcctgcagatgtatttcgacattgcgtgcgaattcatttctgatcgcgattcgccataccggattctcaatggcaaagccctggaagcgtgcctgtatcttctgaccgcccacctcctgtcgctttccacgatgcaagttcagggcgcggctggaggtggcgtcactgccggtgggacccaaggaggtttcatcaccagcgctacggtcggcgaggttagcgtggctaagctcgcgcccccggccaagaatggttggcagtggtggctgtccgggacgccttatggccaagagctgtgggcgctcctcagcgtcaaagcggtgggcggattctacatcggcggtcttccagagcgccgaggcttccggaaggttggaggaacgttctggtgatccctggtgcgaatcttctgcgaatggccttcggggtcatcggtactcaaattgtgaaatatcgcaagtttgagcagcgagtgaagaatgatcaagcccagtacgtatccatgttcggggagcctttcgacctggcagcgtctgtccagcgagtccgacgcgatcagtatgtccagtttaatctggagttccaacggaattatgttatgatcttcgccaactttgagatggttgacttggatcgcgatgtggccggtgaccagttcctctggaccggaagagtttttcagctggagtctcaaggctcctggttttatcaagacggctggggagtttgcctggccgtggatatcggtgcggccaagctcactgatgacgggaaaccgactttctaggtgatgtatgtttgacggcgaactgatagcgaaaatggttgtcgagctgaatgcggcgatgacatctgctcaagaggctttgcagttcccggattttgaagtcgtccagaaagctcagccgacccaacagggaacgtcaaccaggccgaccatctttttccagaaactgtttgacattcctcgcggctggcctgccaccgattggcacctggacaacacggctcgcaaatatgtagaaataactcgacagcatgtagagacgactttccagattagttcccttcattggcagaatcctgaaataactcacgtggttacggcttccgatatcgccaactatgtgagggcttatttccaagctcgatccacgattgagcgagtaaaggaactggacttcctcattcttcgcgtgtctcaaatttccaacgaagcattcgagaacgacaatcaccagttcgaattccacccaagttttgacatggttgtaacttacaaccaatatattcgcctgtacgaaaacgcagcatattcggccgatggggtattaataggcatatgagtctgaggcgcgattcagagctaatcgccgcgcacctccagatgttaagagccatgcgcggcaggtccgtttcagccggatggtattccacggctcgatatcctgacaaggcaggcgggtcggtcggaatacaagtcgcgagaatcgcacgtctcaatgagtacggcggaactatcgaccatccgggcgggaccaggtatattagggacgccattgttcggggccggtttgttggcgttcggttcgtcagaaacgactttccgggagaaaccgaggtaactaagcctcacagaattaccatcccggctagaccgtttatgcgatatgcttggaacttgttttccgcagatcgcgccgcaatccagaaccggatagccatgaggctggccagaggacagatcactccagatcaagctcttgcccagatcggcctggcgttggaaggatacatagccagaagcatcaggaccgggccatgggtggctaactcagcatctacggtcaggagaaagggattcaacagaccgctggtcgatacggcgcacatgcttcaatcgattagcagcagagtaacataaccaggagatcatccagtgatcagtcagagccgttatatccggatcatttcgggcgtaggcgcaggcgctccggtcgcaggccgaaagctgattctgcgcgtcatgactaccaacaacgtcatcccgcccggaatcgtcatcgagttcgacaacgccaacgcagtcctgtcatacttcggcgcgcagtcggaagagtatcagcgggctgcggcttatttcaagttcatcagtaaaagcgtgaattcgccgtccagcatcagcttcgctcgctgggtaaacaccgccatcgcgccgatggttgttggtgacaatctgccgaagaccatcgccgatttcgccggcttctcagcaggggttctgaccatcatggtcggcgcggccgaacagaacattaccgccatcgatacgtccgccgcgacttctatggacaacgtggcgtcgatcatccagaccgaaatccgcaagaatgctgacccgcagctggcccaggctaccgttacctggaatcagaacaccaaccagttcaccttggtcggcgccaccattggtaccggcgtcctggccgtggcgaaatctgccgacccccaggacatgtccaccgccctcggctggtccacctccaacgtcgtcaacgtcgccggccaggctgccgatcttcccgacgcggccgttgccaagagcaccaatgtcagcaacaacttcggttcgttcctgttcgccggtgcgccgctcgacaatgaccagatcaaggccgtgtcggcctggaacgcggctcagaacaaccagttcatctacacggtcgcaacttccctggcgaacctcggcactcttttcaccttggtgaatggaaacgccgggaccgccctgaacgtgctgtcggcgactgctgccaacgacttcgtggagcagtgccccagcgagattctggccgccaccaactacgatgagccgggtgcttcgcaaaactacatgtactaccaattccctggccgcaacatcaccgtttccgacgataccgttgcgaacaccgtcgacaagagccggggcaactacatcggcgtcacccaggccaatggccagcaactcgcgttctaccagcgcggcattctgtgcggcggtccgaccgatgctgtggacatgaacgtctatgccaacgaaatctggctgaagtcggctatcgctcaagcgctcctggacttgttcctgaacgtcaatgcggttccggcgagcagcactggcgaggcgatgaccctggcggtgctgcagccggttctggacaaggcgaccgccaacggcacgttcacctacggcaaggaaattagcgccgtccagcagcagtacatcacccaagtcaccggtgatcgccgcgcctggcgtcaagtccaaaccctgggttactggatcaacatcaccttctccagctataccaacagcaacacaggcttgaccgagtggaaggccaactacacgctgatctattcgaagggcgatgccatccgcttcgtcgaaggatcggatgtgatgatctaatggtttgcggcggactcgatccgccgcgaccttccataaatggagtgaggaataagcaatgatcaacatttctgcgttcggctcgatctgccagttcacggcaagcagaactttcccgaacggattcaccgtcaccgagtttgccgacgatgcagaccccatcgacagcccgccgttcactgcggccgataccggcgtcggcctcaatggtgacatggtagtctggaaccgggcgaacatcctggaagtcgtcgtcaacgtcatcccgaacaccgagggcgagcgcaacctggcagtcctgctggatgccaaccgcaccgggaaagacaagtcgggcgctcgtgatgtcgtcggtttggtcgtggcgatgccggacggcagcaaaatcacctgcaccaacggcacccccatcgacggcgttctgatcaacgcggtggcaagcgtcggccgtctgaagaccaagccgtatcggttccgattcgaaaaagtgatcaaagccggtactagctgatgaagaaaattccgctgacagcagtccccaaccaggcgatctcattcaacgccggtagcagctattggaagattcgcctgtaccagaacatggacatgatgaatgccgatatcagccgcgacggcgtgatcgtttgccatggggtccgctgcttcggcgggattcctcttctccaatacagccatcagtaccgacctgactatggaaatttcgtcttcgaccgcgacgccgattggacattgttcggcgacggcatcaacctgttctatctggacggcgccgaattcgccgagtatcaggcgcttgccacgaggaaagaatgagcacatcaacgatcagaaccgggacgaacaacgatatccttttggacgacaatggaaacatggttatcctcagggatgtcgaagcgtgcgcccaggacgttcgggcggcgatgctcatgcgcaccggcgaaaacattttcgatgtgaactccggtgtgggatatttcgaatacatcttctcgccgcagaaaagctatgatgacgctcgcaaatccatcgcggatgcaattttgtcctcgccggatgtgaccggcatcgagcagctggacatcgacatcaccggggaagtcttcggcgtcgatgcgaaagtcatcaccatccacgggcctgttaccacaggagtttgaaatgagtaccatccgcatccaatacgccaacggcacccaactgttcctggacggcaaaaatccgccgcccctggacccgctgccctcgtttaacccgtctgtcgaagatctggaaggcctggaccgcgaaaagaacatcaacaagggcgactcctcgccggccggtcttcccgttcccccggtaaacgtcgattccaatgtcgacaacggcggaaccatcccggctccggtatcgaccgacgctgctgcggccgaatcggccccggaaggcgcccaggaagctcctgcagcaggccaaggcgacgagaaaggcgccgaggaagccccgactacagccccggtagaaaaggccgaggaaacggcctcgccggccgctgaagaggaaaccccggctcccgccaaggccacctctcgcaaaaccaccagcaagtaaggactcgacatgatcaacgtcagcggcttcggcacaggaattgtaatagtttcagcctcatcgttcccgatggggttttccttgtcgaagttcgctgatgatgagagtccgatatcctccaaagagctggagccgttcggatatgagatgctttatgacggcggcctattcgcctttgacaaggctgctcctctggaagtatctgtgtccgtcatcgcagggagcgaggatgatattaaccttcgcatccttctcaattccaaaaagggatcattcagatttcttccgggcagcatcccggatatgacgactctcgtggccactcttcctgatggcggccgcaccgttctgtccaatgggactatcatcaagggtccggccatcgacaccatacagaacaccggacgacgcaaaggcaacacgtacacttttgttttcggtagctatcttggcgcccagactgcgcgtcaagccatttctaacgttatccaatcggtactggaggtggtctgatgttggggattttcaccagcctcctaagttcgcgatctttttcgattgtggaccaaaacacaaaccagctagttgctgcggatttgaggataagccgggtcaacacccggttttcttctgtagggcaacgccacatgctggaagatggtacgaccaagatggattccagaacgatccaccctatggaaatcatcgtcgaagtattttgcccttcaattgatgtcgtcgatcagatcaatcaattgctcctggatcgcgacacactgtacaaagtcatcactcgcggcatggtattcgaacggatgatgtgtaccagcgaagcgctcaatcagactccggatatgatatcggcgactcctgcgcgactgacattctcccaagttctcgtccagaatcccaagcctataatgttcagaaatgcaggggactcttctatgatcgaccgagggctggccctagctgaagacgtggttggctcggccggcgatctgttcgactacgcagtaaacggcgtccagaacgccgcagacttgttctgaggtgccaattgaactctttcctcaagtctattctcaacacgcctactctcaccatacgcgatgatgtcaccaaacttcctgtctggaagagtcttcaagtcaagaaagtggaaatttactcgccggcttccgtagtgtcgaaacctctggcgacgaaagaccagacggaagctcaagtgtacaccgaagctctggacattgatgtgaagaatggaaagatcatccaaccggtgcgactccgcatcaatgctatctgtccggacctgtccaccgttgaaagtatcatgaacgctttcaatgataacacctcgactttcgctatcacttctaagtcgatattggccgataaaatggccatcatgacgctcgatgtagatcagtctccagacatgttgaacgcggctgagatcaatatggaattcgagcaggttgagcctccagtattgaatgaattcgatcctgcgttccctcaagatagtccgacttatggggtacagattcaatctctttctgatgctaatttgctggatttgggcgccatcggcgattcgatatcttcggccgcaaaatcgctatataatcgcgtgaccagctacttctgaggatgtatcatgcttgaaatcaatcttcccgatggccgtcaaactcgcgtacaaatcgaggcgtggtcagcattggatggctgggacctccagcgccgtttcgtcgaatttgctgtcagccaagattccgacttccgccgctctttcaccatggaaatcctgggctatgcgaaagtgctgcttggcgacgatgacaccggcattccgctgaccaccgcggcagtcatcaacaaccacctcggccactggaagaacgtggaacttgttttcaactctgttctcaagcacaatggcatcgacccggccacgcacgccgaccggccggactattgggaacaagtcggatcgcagatggccatcgcatttctggccgaggcgtccaagctcattggtccagcaatgaagatcgccgaaggactcgccaacaagccggagtgattcatgtctagtgatttggatgaattcatacttcggtatgaggccgatactgccagagccgagcgcaatctggagcgcctccagaaccagatcaggcgcgtgaacagcgcatcgacgagtggccttcaggatttgcgccacttcgcagacggcgcagccaccgaactcggccgagtcgttccgcagattgattctgtgacgagcgcaattcgcggaatgaacgcgcaactggcaataggcgccactggcgtggccctggtcgcggccggcgtcaaggcgttcatgaacaccagggaccagtacaatcagcagcgcatccaggcgatggacatcggcatcgccccggcacgcttggaagagtaccagagaaaattcgttcgccagtccggtggaaccatcagccgcgagcagggcgcggagctgaccaaaaatctggcagacactttccggcgtgcttatcgcgatatcgggcgagtcggcccggaagcgcgaattctgcgtatggccggcgtcgatgtcgggagcttccaaaagggcatgcggccgctcaacgacatcattactgatctggccacgaaaatggccaagctgaagccggacgaaatttctgcctacgctgatgcccttggcgtctcgcgagactacctgagcaccctggctaagatcggcccggccatgggaaaagtcaccgagatgacgactgcggaactccagtccagggtccagggcgagtccaacattcagaaattcaacgatgctctggcgaatctcaaccagacgttcaccaccctggaaaaccgagtcggcgaaaagctcgcgcctgcgttcaccaagctgatcgaaatcatcgacaagatagtccaggctattcccaatgaagtggaaagcttcgcgaaggacaccaaatcccgttgggaagatggagtgctcgggaaggcgaccgttggcagtgatatcctatccctcctcagccccggcgccctgctcggtcgcctggcagcgtgggggactcgtcgcggcatggaagaatcagggctcatcgacaaggacaaggttcccggcgctcaaaccagcgaagacctggccaagaaacaagaagaccaggacaaggctactaagtccatgaaagagctagagaagctggctgaccagaccacgaagtctaccaatgattttgcggtggcgatcaacatgttcagtggcgcggtatcgtcgttcgcgaatgccgttgacgagcgccaagcttgggcagcctgggcgggggaaattggtcgggcggtcggtatgggaagcaccgcgccgacttcgcgggccaccggcgtctatccgcacgcgatctatgatcagtcgaagagtggcgcggccggacaagtcttcggcgagccaatcggcgcccagtctcttcgcaatcgcatgttctcgccgcagcgcaaggccgagcctgtcaccgttccatcgtacatcaacgatatcatcaaagatgcttcgaagatgtacaacattcctgagctggacatcaagaaactcatatacaccgaaagccgattcaacgccagggccaccagcgaagccggagctaaaggcctcatgcagctgatgccggaaatcgccaaggcgtatggtatcactgacgtatatgaccctcgccagaacatcctcggcggaacgcgcctactgcgggaaaacctagatcgagcaaatggcgacatgcggttggccttgacctactatcatggcggactcgatccgaagaactggggtccaaggactcgcgcatatccgggtttggtaatgagcgctccaatcgagctgatggaagaggctcagcgcaagcagaaggctgcggccatgaccgtcgccagcgagacgttcgccccggaaggcggcgacatggacattcgtccctatgatggcgggcgactggaaaccccagaccagggcaagaaggaagatgagcgccgcgaagcccgtcgatatgacgacagggttgtgcgaccggaaattcgcatcatcgaccgcatgccagaccgcagcgacggcgaaatcctcaagatgtctagacgtcaagaggccgaccgggcagattctggattccggaagttcccgaatcaagttcgcggcgagaccaagcagaacatccaggctcaactcactgcaggagccatcgcgcaagtgatcggcgttaaccccaaccagatcatgcgccgcgaaatcagccgttctgacttgctgttcggatacaaccaagccatcctgggcaagcaacaggagatcaaggccgccgcgaccgaagccaacaacgtattcctgtctccagccaagcttgccgaagccacggccaaggtgaacgcagcatcgcgagaaatggatattctcaggacgtatggcgagcaacttctgaagagcgctccagagcgcggccaggagctgaccatcggtcgaatcgacatgttggtcaacgtcaccggcgcgaattctccggaagaggctcgcgagatattcagcaagcagactgcagaccagctgactacggcaatccaggacgctcaaaacgattccgcaactaagatactctactgatgaaaaagagaattctgcgagtaacattcaacatgccttatggacccgaagtcatccgcgaagatctggatgttcgggtccggattatgaaggctgcgttgcggattcagaaccgggcgacgatggaaattttcggcctcaccactcagcttcgcgagtctcttctgtcgcagttcaccgcgtggaagcatcggcaacgtcaagtgggcatggaagatgaattgatgatcaaggtgtcggtggaagccggctactctgaccaggggcgcgagcaagtttccagagtctttgtcggcgaagtcgccattgtcgatatcatttctccgccaccggacattggaatccgcatccagtgctataccaggcaaatcgacaggacgaagaccattcggaatatgccgctcgccaacacgacgtttgtcaagttcgtcgagtggggcgcgaacgaaatgggattgaacttcatctgcgataccagttacaacgatcaagttctgaagaatccgggccggtctatcactgtcgcgtcggcaatcctggcgtcgattcaggatatgtacatgccggacgtggccgcgttcgtcgatgacgacatattgatcgtgaaggaccgcgataaagtcattcgtccggatgaggtaaccaacgtcaactcgtttgttggaattccatcttggtctgaatggggcgtggaattccagtgtctgtttgagccatcgattcgtgtggctggaggcgtagcggtcgaatctctcatgaatccaagtgttaatggtaactatgtaataactgctctggaatacgatttggccagtcgggatcggccgttctatatcaaagtcatggggagtccagcagcataatggccagggaaatcaaatcattcaacatgttcggagttcactatacttcgcggcaattctctgctgtcgatgggctcagcatgatgtcggaaattcagagcgtgccgccagaagaattgctcaagggcactgatgtattggcgcatccggaagaccatccggaaggcatctggcttccattgactgctgcgaacatcaatctttatgtcgttgatcgagcgaaagtaatagctcccgtacaagttcttgcacttctgtccgaagtggtaatcgactggaactttggttttctcaaagactggaccggagtcaagattccatccagatttgtcgaagatatcaaaagcgtgaagacggcacattcaccttctgtagttgcgagtttggtggcgaacggttcggcctctatgcgcgagttggaagagtattattcgactcaagatgcgtttaagatgatagacatcatgacggcgaagagcgtgaacgaggccttggcgtccgaagcatcgcacaacagaatcaaaaagggataattcctaaccgggcctgggaaggctatactagacctgccaaatcagaggctttcccatgtccaatatttctctaacatccgcaaaagctcccgacaggacgcgactgatcgccgctcttgacgctcggtcgcggcgggatgctctagatttcgaagtaatgataccggctcaggttgttcaatatgacagggccgagaatatcgcgacgattcaacctctcatcacctgggttgacacggaacacaacgccgtccaaaggcatcagctggttgatattcctgtaatttccatgggggctggcggcttccacataagtttcccgattcagcaaggtgacataggctggatttatgcggccgaccgcgacacgtctcagttcctggagtcgttgtcaatgtcgaagccgaacaccggccgcatccataagttcgagcatggcctgttcatcccggacgtattccgtcgatacaccatcaattccgaagattcggccgctatggtcatacaatcgacttccggagcgaccagaatttcgattcgcggcgacaacatcaagatcactgcgccgtcgaatgtcaccgtggatactccgcaggcgaatttcactggaagtgtgactatcgccaacaccctggttgtaaacggcgtcaacgtgaacaaccacggccacctcgaaaacaacccgcctgatgcccggacgaaaggcggcatgattgcttaaggagattttcatggcaagttttgatttttctgatttaacagcgggggggggttgtaatggctaactacaactacatcgtcgatactggtgtgatagtcgcagataccgccgacgttctgagcgacgttgaggccgagttccgcgccgccctcggtgccaatatcaacttg

SEQ ID NO: 5 - DNA, 42999 bp, Unknown
  source: /note="Description of unknown: bacteriophage strain capable of infecting bacteria of the genus Pseudomonas"
gagcagaacctcctaatgcaacagcaggcggaccagctcgcacgaaaccagcaggttgacctcaccgccgagaacgtggcgcaggttgacctaggagcgatggccgatgccactggcaccggcacgcgacggcgccggaatcaggcgggcacaggcgtatcgcaaaccctcggtatcaactactgacgaggtacgccatgaaaaccaccgcagctatgctgtgggagaaacttcgggatgggagcgtggagagtcgagctatcgagttcgccaagaccacgctgccctacctgatggtcgatcccatgtccggcagccggggagtcgtagagcatgacttccagtccgccggtgccctcctggtgaacaacctcgccgccaagctggcgagatcgctgttccccacggggattccgttcttccgatccgaactcactgatgcgatccgccgcgaggccgacagccgggacacagacattaccgaagtgaccgctgccttggctcgggtggatcgcaaagcaacacagcgcctgttccagaacgcctccctggcggtcctgacgcaggtgatcaagctactgatcgtgactggcaatgctctgctgtaccgcgacagcgccgccgctacggtggtcgcatggtcgctccgctcctatgcggtgcgtcgagatgcgactggccgctggatggatatcgtcctaaagcagcgctacaagtccaaggacctggatgaagagtacaagcaggacctgatgcgcgcaggccgcaacctatccggttcgggcagcgtggacctgtacacccacgtacagcgcaagaagggcacggcgatggaatacgccgagctgtaccacgagatcgacggcgtgcgtgtgggcaaggagggccgctggcctatccacctgtgcccgtacatcgtgccgacctggaacctcgcacctggcgagcactacggtcgaggccacgtcgaggactacatcggcgacttcgccaagctgtccctgctgagcgagaaactcggcctgtacgagctggagtcgctggaggtcctgaacctcgtggacgaggccaagggtgcggtggtcgatgactaccaagacgccgagatgggtgactacgtgccaggcggtgcggaggccgtccgtgcttacgagcgtggcgactacaacaagatggctgctatacagcagagcttgcaagccgtagtcgtccgcctgaaccaggcgttcatgtatggtgccaaccagcgcgacgccgagcgcgttactgccgaggaagtccgcatcactgcggaggaggcagagaacacgctgggtggtacatactcgctcttggctgagaacctccagtcgcccctggcctacgtctgcctatccgaggtggatgacgcgctactccagggcttgatcaccaagcagcacaagccggctatcgagacgggcctcccagctctgtcccgctccgccgctgtgcagagcatgctcaacgcttcccaagtcatcgctggcttggccccgattgctcagctcgatccccgcatctcgctaccgaagatgatggacacgatttgggcagccttcagtgtcgatacgtcgcagttctacaagagcgccgacgaactggaagccgaggcagaacagcagcgccagcaggccgcgcaggcccaggcagcgcaggagaccttgctggaaggcgcttccgacatgaccaatgcactcgcaggagtctgatagatgacccaacagaacgaacagcaactgccgccgggcctcgctaacctggttgccaacgtaccatccgccgccgcgccgacaccgagtcatgtgcaggtaatgccgaacccggtgatccagccgcaggctccggtccagcccggccaggtaggtgcgccgcagcaactggccatcccgacccagcagccgcaacccgttccgaccagcgccatgacgccgcactaccagccggtagcggcacctgccgtgggtcaacccgttgttccgcaagcacccgctcagccggccccggtagctccgccggctgcgggtgcagttcttcccgagaacctggaagtcccaccgccgccggccttcactcccaacggggagatcgtgggcacgttggcagggaacctcgaaggcgacccgcagttggcgccctccatcagctatctggaggcgttctctgataaactggataccgtccgagccttcggcaaggccgccgagaaccgcgatcctcggttcatcgacgagcactatctgaaggaagttctcggcccggcccaggcgcagcacgtcatcaacgtggccaagggcgtcctgacctatgttgatgcgcagaccaaggccgtcctgagccagacctatgccgccgtcggcggtgaggccatcctgaagcaggctgccggagtcttcaaccagcacgctgacccggccaccaaggccgccatcggtcggctgatggactcgggcgatgcccaggccatgcaatacgcagcgaagcagattgtggccttcgcacaaggctccggtgccgtggtacaggctaccggccaacccctgggtgctgcggcacctgcactggcagctctgagtgctgagcagtaccgcttggaagtatccaagctgccgctgaacgcatctgaagccgagatggctgcgctgcgcgagcgtcgtaaggcaggcatggcgcagggtatctaacgaccctgcctactccggccttaaacccacatccaaaagagagagcatcgtatgagctttttgaacgacctgacccgtccgaactacgctggcaagaacgcggacgttgacatccacctggaagagcacctcggcatcgtcgataagcacttcgcctacacctccaagttcgcaccgctgatgaacatccgcgacctgcgtggctcgaacgtggtccgcctggatcgcctgggtaacgtcgaggccaagggtcgccgcgccggtgaagagctggagcgcagccgagtcgtgaacgacaagtggaacctgaccgttgacaccctgctgtacctccgccaccagttcgaccaccaggacgagtggacccaatccttcgacatgcgtaaggaagtcgccgagctggatggccaggaactggctcgcaagttcgaccaagcctgcctgatccaggtgatcaaggctgccgcgatggacgcgccggtggacctggaagatgcgttctcgccgggcgtgctggagaaactggacctgaccggcctgaccgccaagcaggctgccgacaagatcgtccgcatgcaccgccgcgtagtcgagaccttcatcgaccgcgacctgggcgatgcggtctactccgagggcctgaccccgatgtcgccgcgtgtgttcagcctgctgctggagcacgacaagctgatgaacgtcgagtaccaggcaaccggcgcgaccaacgactacgtgaagtcccgcgtggccatcctcaacggcgtcaaggtgctggagactccgcgcttcgccaccaaggcaatcgcagcccacccgctgggccgtcacttcaacgtgagcgccgaggagtccgagcgccagatcgccctgttcctcccgagcaagaccctgatcaccgcccaagtggcgccggtccaggccaagctgtgggaagacaacgagaaattctcgtgggtcctggataccttccagatgtacaacatcggtgcccgtcgcccggataccgctggtgccatcgaactgaagggtatcggcgccttcgacatcaccgcgtgatgccacgaaaccccgcacttcggtgtggggtttcttcaaagcctaatgacccgcgcagattccctgcgtgggtttttgcgctttaggagaaaccctatgctactactcgacgcagtgaatgtcatcctgcgcaagatcggcgagctgccgatcccgagcatggatgagacgtatccaaccatggccatcgccctcccggagctggaagatcaacgcatccagttgctgacacaaggctggtggttcaacacctggtggaggcacaagctgacacctgaccccacgggccgcatcaacctgcccaagggcaccttggcattctatccggattccccggacctccagtgggacggcctgggggtgcgagatgccaacaccggtgacgaccgcatcggtaagccggtcgagggccgattggtgctgtctcgggagtgggaccatatcccggagatcgcacagcgcgtcattgcgcaccaggctgcgctcgcggtatacactcacgagattggaccggacgagaccgcccaggtcatcgcccaggaattgcaggcgtatcagaacgaactgtcccgcatgcacacccgatcccgtccgctgaacacccaggccaagcgtagcttcagccggtggcggcgcagcttgaggacctgagtatgagctacaagcaatccgcgtatcccaatctgctgatgggtgtgagccagcaggtgcccttcgagcgcctgccgggccagctcagcgagcagatcaacatggtatccgatcccgtgtcaggacttcggcggcgcagcggtatcgagctgatggcccacctgctgcataccgaccagccctggccgaggccgttcctctaccacacgaacctcggtggccgcagcattgcgatgctggtggcgcagcaccgtggcgagctgtacctgttcgacgagcgggacggtcgcctgctgatgggtcagcccctggtgcatgactacctcaaggccaacgattacaggcagctacgggccgccacggtggccgatgacctgttcatcgccaacctgagtgtaaagcccgaggccgaccgcaccgacatcaagggcgtagaccccaacaaggccggctggctgtacatcaaggcaggccagtattcgaaggcattctccatgaccatcaaggtcaaggacaacgccaccggcaccacctacagccacacggccacctacgtgacgccggacaacgccagcacgaaccccaacctcgctgaggcgccattccaaacgagcgtaggctacattgcgtggcagctctacggcaagttcttcggtgcgccggagtacactctgcccaactcgacgaagaagtacccgaaggtggacccggacgccaacgcggcaaccatagccggctacctcaaccaacggggcgtgcaggacgggtacatcgcattccgtggcgacgccgatatccacgttgaagtgtccacggatatgggcaacaactacggcatcgcgtcaggtggtatgagcctcaatgctacggcggacctgccggccttgctgccaggagtcggtgcccctggtgtgggggtgcagttcatggacggcgctgtcatggccaccggctccaccaaggccccggtatacttcgagtgggattccgctaaccgccgctgggcagagcgggccgcctacggcaccgattgggtcctgaagaagatgccactggccctgcgctgggatgaggctaccgacacctacagcttgaacgagctggagtatgatcgacgtggctccggcgacgaggatacgaaccccacgttcaacttcgtcacccgaggcatcaccggcatgacgaccttccagggtcgcctcgtcctcctgtcgcaggagtacgtctgcatgtcggccagtaacaatccgcaccgctggttcaagaagtcggcagccgcgctgaacgacgatgatcctatcgagatcgcagcccagggcagcctgaccgagccgtatgagcacgcggtcaccttcaacaaggacttgatcgtcttcgccaagaagtaccaggccgtggtcccaggtggcggcatcgtgactcctcggacggcagtcatcagcatcaccacgcaatacgacctcgacaccagggcggcacctgccgtgactggccgcagcgtgtacttcgctgccgaacgcgccctgggcttcatgggcctccacgagatggccccgtcgccgtccacggacagccactacgtcgccgaagacgttaccagccacatcccgagctacatgccggggcctgctgagtacatccaggcggcggcctccagcggctaccttgtgttcggcaccagcacggcggacgagatgatctgccaccagtacctctggcagggcaacgagaaagtgcagaacgcgtttcatcgctggacgttgcggcatcagatcatcggcgcctacttcactggtgacaacctgatggttctgattcagaagggccaggagatcgccctgggacggatgcacctgaacagcctgccagcccgtgagggtctgcaataccctaaatacgactactggcggcgtatcgaggcgaccgtcgatggtgagctggaactgaccaagcagcattgggacctgatcaaggatgcctctgccgtgtaccagctacagcctgtggccggcgcctacatggagcgtacccatctcggcgtgaagcgcgagacgaatacgaaggtgttcctcgacgtgcccgaggccgtggtcggggcggtgtatgtggtcggctgcgagttctggtcgaaggtggagttcactccgccggttctccgggaccacaatggcctgcccatgacctcgacccgtgcagtgcttcatcggtacaacgtaaacttcggctggaccggcgagttcctgtggcgcatcagcgacacggctcgacccaaccagccgtggtacgacacgacgccccttcggttgttcagccggcaactcaatgccgtggagcctctggtggatagcgctgtggtgccgctgccggcacgggtcgatatggccacgtccaagttcgagctgagctgtcacagtccgtacgacatgaacgttcgggctgtcgagtacaacttcaagtccaaccaaacctacaggagggtgtgatggctttctggctaccactattggccgctggcggcatgtccgcccttcaacagggattggccaacaaggaagagcgcaacaagatcaaggccgagaacaaggctcgactgaagacggacctcgacaacctgggcgccgctgcccgcgacatcgccaacctcggagtcatggccgctagttaccgcaagcaagccgtggcctcgcaggtggaggccaagcgccaggggatgctagccggcggaagcgccgaggctcaggccggggcgttcggcgtcaagggtgcatccgtcgatgcggtggccctggatatcgagcgggaggtcggcgaggccctgatccagattgacgacaacctggacaatcagatgtggaacctcgccgagcaggcgcactccatccaggctcaggctaaggccggcctgctgggtcagaagagtaccacggcggggcaacggtccccgctggtggccggtctgatgtcggcgggttccctgtacgcaagtcaatacttcaagttcggcgccacgcctaaaggaggcaactgatggcggaatcgcaacgtgcttcccaagagcttgggatcaacgtcggacagacgcaactccagccgggccagagtgctcggcgcggagtgcgcgactccgaggtcaactacagcggtccgagcgtaggctcgcagattctcgacggcatcctgggtgccggtcagcagatcgctggcaaatggttcgagcacaacgtgcagcaggaagttctgcgcggtgagcgtgcccgtatggccggcgaggctgaggaggcagtagacagcaacgtactggccaaaccattcgtgaagggtggttggcgtaagcaggactaccgtatcgcccaggcggacttcagcctgaagatgcagcgattcatcgccaacaagggccgggagatgactcccgaggagttccgcaagtacctgtcccaggaggctacgcacgtcctggactcgaccgagggcatgaaccccaacgatgccttacaggcgctggcgcagcagcagaaggccgaggaacagctcttcggcatgcaggctaaggcgtacatggactggtccatcgaccaggccgcccgtggcttccgtacccagggtaacagtatcctggccaaggctgtgcaggctcaggccaccggcgacgaactgtcccggcagctcagcctggaagaggccggcctgttctataccaacatcatgacctccgaggatatcccgctggaggtgcgcgacaaggtaggcatgcagttcctggcagccagcctggacatgaaccagcggggcatctatgagggcctgcgcgatgccgggttcctggacagtatgtcctttgacgaccggcgtgcgctcaacggcctctatgaaaaatcgaaggcacagacccgtgccaaggaatcgatggctaccctgcgggccgacgcggacttccagcagcgggtggccaacggcgccatcacagaccttgccgaggttgaggcgtactcacgaggcatggtcgaggagggccgctggagcgacgctcaggccatctcattcatgaccaaggccatgaccggcctgggcaacgctcagcgcatgcagggcatcatggcggccttggaagccggagacatcaacgccctccacacgctgggtaccaacgtcaccgaggcgctggagcagtgggacaagatgcaggccgccaacggctcaagcctgactgaccgtctcgtgcggggcacacagctcggcctgcgcctggggaccttccccaagacctacggcgagtccgtgggcagcgcggtgcgcatgatccaggccgccaaggaaggcgaggcaaatccggagctggtcaacacgctgaacagcatcttcgaacaggtggcctcggcccaggagatcaacccctccgccggcaacgtgatgctatccggcatcccggaagccgagcagggcgccgtggcctgggcactcaagcagatgaagatgggcatcgccccagctcaagctctgcgcgagtttagcgccaacgccgaagtcgtgaagcagatggacgagttcgagaaaggccagaacaccaaggcattcaaggacaacctcggtaagcaggtcaacgacaagttcgtgaacaacatcttcggtcgggcctggaacatgctgaccggcgagagcgacctgagcaacaacgaggccgtcctgagcatgtatcgccgggcgaccatcgacgaggcgaactggctggccagcgaccgcaagcatgcgggtctgctcaccagcgacacgggccgcgaagcccttctggagatcgccgccgccaacgtgcgcaaccgcaccatccaggtgggcgagggccgcaacctgaaggaaggggacctgttcagccgccgcgacagcgcgccgctgatcctaccgcgtggtactaccgccgaacagctattcgggaccaacgacaccgagaccatcggaaccgtcctggccgagcagcacaagccgcatgtcgaaggactcctcggctacaagtcggtagtcgccttcgagtacgaccgcaccagcggcagcctcctcgccgtcgagtacgacgagaacggtgtggccctggaccgcacgcgggttgatccccaggcagtcggtaacgaggtgctcaagcgcaacgcggataagctgaatgcgatgcggggcgccgagtacggtgccaacgtcaaggtcagcggcacggacattcgcatgaacgggggtaacagtgccggcatgctgaagcaggacgtgttcaactggcgaaaggaactggctcagttcgaggcttaccgaggggaggcgtataaggatgccgatggttatagtgtgggcctggggcattacctgggcagtggcaatgctggggcaggcactacagtcacgcctgagcaagccgcgcagtggttcgccgaggacaccgaccgcgcactcgaccagggtgtgaggttggccgacgagctgggcgttacgaacaatgcctctatcctgggattggccggtatggccttccagatgggcgaaggacgtgcccgacagttccgtaacaccttccaggcgatcaaggatcgcaacaaggaagccttcgaggctggtgtgcgaaacagcaagtggtacacgcagacgcccaaccgggccgaggcattcatcaagcgcatggcgccccacttcgatacaccgagtcaaatcggtgtcgattggtacagcgccgcaacagcggagtaagacatggcaaagcaattcaagggccgcatgacgcccaagtatccccttgaccaagcacagctcgacgaggcccaagtacagggccaactcgacgcagtgcctaccgtggggttcgacgccctgacgggtggcgagatcggagaacggaacgtggcagcgggccaacgagccaatgcgcgggaactggaacgcatcgtagcggaccaggaactgccggcccttgaccgtgcttccgcactctggaaccagtccaccctcgtcggacgctggggcgatgcgctccagctcgacgcagaccttgcggcgaacagtaccggcgaggtggaccctaacttcgacgctgggacctatggggtccaagcactccaggcggcaggtatccagccgactgataactaccttcagatcatggcccgtgccggcaatgccgaggacgcggcctacctcctatcgaggattcaacggtatgagcaggacgaacaaatcgtgcgggacaacccgtactggaacttcgcggctggtatgctggacccggcagccctggcagttgatgcggttactttcggcgctggccgtgctctgcggctcggtcgtgctggcatggctgctgctggcggcgctgggcaagtcgggtatgttgctgggctggatgccgcaggggccaacgtggatgccggaacctacatcgtggcgggtgctcttggcgctggcgtgggtgctctgctggggtctggtgcgggacgcattgccgcagaggccccaacgcaaccgcatgtgcccgaagtatcggcgcctactgtcgggctgccagaagtagccatgaccgccgaggaggccgcagcacgcggcttcaaggcaggtgacgtggtagacctgctggacgagggcactgtgctatcccgtgtcagtgcccgcgtggagcaggctgagataccggctattccgcgacgtgacactgccttcggcgacgagcttcatagcctgtcgggccggaagctgtctgaggtcctggaccacctcaagacccacgcagaggtgcctaagccgctccagggcatcgccgccaaggtggctgataccatcaggaccctggagggcctggggcagcgtaccgcgttccgtgtggtgcagggcggtgacactgccagctctgccttcctcaaaccgggtacggcggggattcactccactcagggcctcgacaccctggtccaggtacgcggcagcaccgcacctggtcgagttggcaccaacccggtgaccgtgctccacgaggcggttcacgctgccaccgtgggcgtgatgaacgccgccctgcgcaaccccggtgcgatgagtccgaaggtggctcaggccatgcagaccctggagaatgtccggggtaacgtgctcaacgccctgaagcaggaccgcgccgccggtcggcaactgtccgagttcgaagagacgctgctggccggtaactccaacaccctggccaacgtcaaggaactggtagcctggggcctgacggatacccgcttccagcggaccctgaatcgcctccgctacagcgacggcgggccgggcctgtggtcccgcttcgtggagggcatccgcaccctgctgggtctgcggtccgatgctgacacggccctgagccgcgtcctggccgcctctgagacgattatggaggccatgcccggttacactaaggcacaggccaagtgggccaacaagggcgctccggtaaccgaggaggccagcctggagaccatcgtccggtccaccagggagcgcgcccgcgagggtgccggcttcgtgaacaggttcttcagcgaggcagacctcctggcacagcccggagagggcgcacggcgactcctgagccgtcttattgacgacccggtacgtcgggatgggttcagcacgaacgacaacgcagcgagctatctccgccgctatcggaacgagttcgagggctacgtgaagtcctacgacgagatgatggccaaggcaatggctgagcagggtgtgggcctgacggcacgtgcgctgaactcccgccgcgccatggcagtccgggaccagctcaacgagcaggtcacccgcgagctgctgcgccgggaccgggagtggaccgcctacggcagcgtccgcgtagacccaagcctatctccgaccatcaaggccctggccgaccgctcagacgagattcatggcctgatgggccaacgtgcccgcgaagccggcgtccgtggcttcgaggacttcgcacctcgtccggggtacttccaccgctcgtggaactggtccaagatggctcagatggatgaggccgcccctgggctggcacgtcgagccatcagcgaggctgtattccggggcatccctggactggagcgcgctgacgcctataccatcgcacaggccattgtgcagcgagcacgggaccgggctaccggcatccgctccgagttcatgggcgcgatgggcgtagcggacacggcattcatccggcaagcgctggaggaggccaacgtgtcccaggtcaagttcgacagcatcatggccaagatcgagcagaagcaatccgaccagggcaccgtcaaatacggtaagggccgactgtcactggacatgaccgccgagatcaaccacaacggcaccgtgtaccgggtgcaggacctgatcgaccgggacctcgaccggctgatggagaactacgccggcagtatgtcgggccgctcagcattggcccgcgcaggtatgccgggagactcggagatcgaagccttcatccgggagtaccagcgagaggcagcccacctgggtagcgataaggtgcaggagctgacggggcaactgcggggagtcttcggggacttcaccggcaacgtgccgagggagcatcagctcggcccggttgctcagcgggccagcggcctaaccagcgccaccatgctgggattctccggcgtgtaccagctcgccgagctggccacgatggcgcaccgtcaaggcgtcttcaacgtcatgaaggccatgctgaactcccgcctgggcgacttcgtgggtgccatgcgccgcgacccggacctcgctgacgagatgcagaccgtcctcggcctgaacctcgctaacgatattcggatgaagccctggaagcggcagttcgacaccttcctggccagccaagacaccttcatggatcgcttcctccacgcgggtaagcaggctgtccccgtgctcaacggcatgaagttcatccacaactggcaatcccgtatgaacgccaacctcaccttgaacaaggtggcgcgggcggcgcagggggatgaagcagcccttcgcgtgctccagcagtacgggaaggacgtggactggacgccagtcctggcgcgggttcgcggttatgtcacatacagaggaaggaacgcccaatctatgaattggggcgcctggagccaagcagacgtgaacaccgtcatgaataccgcacttcggatcatggacgactcgctgctgtatggtcgggtaggtcagaactcgggctttgcccggtcacctgtcggtcaaatcctgggccagttccgtagctttgtggccttcgcgcacaacaagctcctccggggaacctatgagaactccggcgtgcttggcgtggcctcgctcctcgcattccagtatccgctcaccgcgctgatgatgggtgccaaggcagcgatcaacggcaagttcgacacctctgatgaaggcatccgcaagatggccatcgacggcatcggctacactgccggcctgggcttcaccgccgatatgtggggtgtggtcactggccactcccgaatgtctgctccggtcttcggactggctgaacactccaacgaagtgttccgaggcgttcgagacctcgtaaccggcgacgacccggcagcagccactggcgatatcgtcaacggcgtgacgggcgcactgcctttcgtcaacgtgttcccggcaactaagttgctgttggaatccatcaaaggggaataacgtggctcggttcaagaatcccgagaccatccacgttgcagatggggtcgaggctgtcttcagtctcgacttcccgttcctgcggcgtgaggacgtgttcgtccaggtcgataagatactcgtcaccgactatacgtgggtagacgacaccaacattcaattggcagtggtgccgaagaaggatcaagaggtccgcatcttccgcgacacgcccgcccaggtcccggacactcagttcagccagggcatcccgttcctgcctcgatacatcgacgcgaacaacaagcagctactgtacgctgtgcaggaaggcatcaacaccgcgaacctcgccctggacggcgtactcgacgcgatccgtatcgccgaggaagctcgtcgcctggcgcaggaagcactcgacgccgccaatgaggcgcttcgccgtgccctgggcttcgctgagattcgcaccgtgaccgaggactcggatattgatccgagctggcggggttactggaaccgctgcatcactgccgacaagcctctgaccttgaccatgcagatggaagacccggatgcaccatgggtcgagttcagcgaggttcacttcgaacaggccggtgtgcgtgacctaaacatcgtagccggtcctggcgttaccatcaaccgtttgcagaacaccaccatgcagctctacggcgagaatggcgtgtgtaccctcaagcggctgggcgctaaccactggatcgtgttcggggccatggaggacgaataatgcgcggcattatcgcgggcatcatggcctctcaaatccgacggcccaagcccatcctggccacctatccgtaccccatcctagccacggacgacacatggtcctgccaggctaacatagtggcggctctaacacgggacaccctgcacgaggttgtgaaccaacctggtgaggacacctaccaggcgtctgccggcgtggtcgaagtgctgctaaggtcgctgactcagcttgggtatggcggcggtgatgggttcttgactggacctgccatccacgcagcactgctacgcgacacggttaagggctacaacgcggaaccatacgcgttcctgtcacagaccgcagtggtaggtgctgagctgaaggtcgtcgttgtatattccgaatacatcgtcgagccttatgcctttgccaccactacagcaattaaacaggcggaactgaccaatgtttaagacacgcgttaagggtcgctacaccgtgacccatctgaaagccacgggcgaggtcctggcgcagtacaccttcgacaacctcatcactaacgcaggtctcgattggatttgcgccatggacacctcagacctgttctcccaggcactggccgtgagcaccagcacagcggaccctaaccccgccgcgccctccctgccggaggaagttcggcgcaccacctcgtatgcccctggcggtgacgtgacctcgggcctggatggggagtggatttactggcacaagcggtggcgcttcccaataggcaccttggccggccaggtactggccaccgtgggcatcgtagctcaatccgaggtagggtttgagagtaacaccggcgcgaagattccggcaggtactcccctctcctacacccggatcaaggatgccgccggccagcctacaacgttggtagttcaggccgacgagattcttgacgtgcagtatgaactacgtagtaaggcggtgacggcggcggaggctaagttcgttatcgctggggtcgagcgtaccatccggctcactccgctgcccttcgcaaaccgtcggaacctgtacggtgagcgctacatctcctacaacgagagtcctcggattgacggtaagaatgcgtccggctcggatgtccaggatggtcagtgggtgaagctatacccgcgatatacgcggggtacctacaagggacagctaatgctgcgggccaccgttgataatggcaacatgccgggaggcatcaccggctgcaaggacctgaagatttacaacggtcggaactacgcactcaccatcgatccgcctgtagtcaagaacaacacgcaggagttctccatcacgatggagttctcggtagcgagggcgtaacccatggcgctgatctatgacttcaacgaagacctcgatcccaaggccaagtcgaagttcgtaggtgcccgagcacgtcgcgacatcagtgacgtgctcgacttctgcgacggtggggtcgccatccaggacccctccgagggactattcgtccgggtatggcgcaccatgctgcggaacgacggcacctacctcggctgggaggacggcaccaacgaagtgcgcattggcgacggcatcgacgcgggtatctcgacgatatccttggacttcgacagtaatatgaactacgtctttgtgttcgtccgcgcagacaagaccggcgccctatcgtacttcaacatacagcagggccgtcgtatcgtagttgagctgggccaagtggactatgccaaggtagccctcgacgacaagcgccccggcgcaactgcgtgggcacaggtcatcgtaccctacacccgaggcggcaacatgtacgtccgcacgcaaaatgagaactacaccgaagagcacctggaggtggataccggcaaggtattccggcccctggtaaaatgcggcatgggcaccaacctccgcttccaagtccaattcagagggcacatgtaatgagcaaaaagcagaccgcgagtgctgagcggctgggcctgcttcacgagctggtctgcaccgctatcgagcgcaacttcaagtggtacatggacaacgacatcccgatccccgcatcggatatcgctgccgccaccaagttcctcaaggacaacgagatcacctgcgatccgtccgacaccatcaacatcgaccgcctccgcgaggagatgcggcaggcgcaggccgagaaccgccgtattgcgctggaaggcttcatcgccggtgagacggacgacgagatggaacgtctgtacacccactaaggaggcagcatgacgccgcaagaacgattccagatagcccacgaggtgcgggacatgtacccacgcttccgggacttctgcctggacgccatgctgttcctcggcttcaagatgacgtggatgcagctcgacatcgccgacttcatgcaggactcgcccaacaaggcaatggtcgctgcgcagcgtggcgaggccaagtccaccatcgcctgtatctacgtggtctggtgcatcactcagaacccggctacccgcgccatgctggtatccggctccggtgacaaggccgaggagaacggccagttgatcacgaagctgatcatgcactgggaccttctggcgtacctgcgccccgaggcccgcatgggtgaccgtacctcggccaccagcttcgacgtgaactgggcattgaagggcgtcgagaaatcggcctccatcaactgcatcgggatcaccgctgccctccagggctaccgggctgacatcctgatccctgacgacatcgagaccacgaagaacggcctcaccgccaccgagcgggccaagctgacgcggcagtcgcaggagttcacctctatctgtacccacggtaagattctctacctgggcacgccgcagtcccgtgagtcgatctacaacggtctgccggcgcggggcttcctgatgcgcatctggccgggccgcttcccgaccctggatgagcaggaacgctacggtgactggctcgcaccttccatcctggcgcgcattgcccgcctggaggagaaaggccacaacccgcgcaccggcaagggcctggatgggacccgtggctgggctgccgatccgcagcgctacaacgaagaggacctgctcgacaaggagcttgaccaaggccccgagggcttccagcttcagtacatgctggacaccagcctcgccgacgagcagcgtatgcagctcaagctgcgcgacctgctgttcatcgacgccacgcatgagagcgtgccagagcaagtggcctgggctgccgatgagcgcttcaagctcaagttcgacgcccaccgattcccggtcatcaaacctgagctgtacctgccggcgctgatggctggcggctgggcaccactccagcaaatgacgatgttcgtggaccctgccggcgacggtggcgacgagctgtcgtatgccgtgggcgggactcttggcccgtacatccacgtcgtgagcatcggcggctggaagggtggctttgccgaggagaacctggagaaatgtattgccctggctgcgcgttatggcgtcaaggtgatctatgtcgagaaaaacctcggcgctggtgcagttggccagctcttccgcaaccacatgcgatccatcgacccggacaccaacaagccccgctatgaggggatcggcgtagaagaccgccagaagtccggacagaaagagcgtcgcatcatcgacaccctgcggcccatcatgcagcgccaccgtctgatcttccacgtatcggcgatggattccgaccacgtgtcctgccagcagtacccagcggacaagcgcaacgagcgctccgtgttccaccagattcacaacatcaccaccgaccgaggctcactgccgaaggacgaccggatcgatgcccttgagggccttgtccgcgagctagcacccacgctcgtgaaggacgacgaagccgctacccgcgctcgtgaagaggctgccaagaaggaatggctgaacaacccgatgggttacactaagtctgtccttcggtctctcggcataggccgggagcgtcgcaagggccgcccaaaaggacgaagactatgatgctcgataccgccaccgaggcgggcaaaggcaccctcgccgtcaccggcgtggggatcgccgtttactcgccctatgagatcgccagcctctgtgctgcggtactcaccgcgctctacgtgggcgcccagctcatcaccctgctcccaaagatgctcgatagcatcgcggagcttcgccggagattcaagaagtgaacaagcccctgcgcggcgcagccctggcggctgccctcgccggccttgtcgccctggaaggcagtgagaccaccgcctaccgagacatcgccggcgtccccaccatctgctctggaactactgccggggtcaagatgggcgacaaagccacaccggagcagtgctaccagatgacgctcaaggactaccagcgcttcgagcgcatcgtcctggacgccatcaaggtgccgctgaacgtcaacgagcagaccgccctgacgttcttctgctacaacgtgggtccagtctgtacaaccagcacagcgttcaagcgcttcaaccaaggccgcgccactgagggctgccaagccctggccatgtggaacaaggtcacgatcaacggccagaaggtcgtatccaagggcctcgtgaatcgccgcaacgcggagatcaaacaatgcctcgaaccatcgtcgcaatactcgtccttgctgtggtagccctgggagcctcgtacggcttcgtccagagctaccgggccttgggtatcgcccaggaggagatcaagcggcagacggcccgtgcggaggccctggaggtgcggtacgccaccttgcagcgccacgtcaaggaggtcgctgccaagaccaacacccagcgccaggaggtggaccgtgccctggaccagaaccgcccgtgggctgaccggcctgtgcctgctgctgtcgttgacagcctgtgcaaccgccccggcgcccgctgtgctgtgcgaacacccactaattgaccctaccacccaggctggcctgatccgcgctgtagcggcctatcaggacgccctggacctatgcaacgccttgaatcaaggagattgacatggcgaacacccgtgagcaatacctcgctggccgtaacaccggcctgaccttctaccaggtctgccagcccggcaccgacaaccgcatcgccctgcacgacatggacgaggccgatgtcaaggccaaggccaccgctgtgatcgcagcagccaccgccctgggcggcgagggtggcgctactccaccggacccgctcaccgcctacaaggtgaagaacggtgacaccctgcccgtggacggcggtggttccgtgaaggtgaccatagccaacggtgccatcaccaaggtcgtgtacaccgcaccggcgggctgagcttcagcccgtccaacctgactccatccataacacaaggaacttaaccatggcaaccttcgccgctgcaactcagaaagacctccgcgccttcgccggtgctatcgagaacctgatccgcccgctggaagaagcggccctgggttctggctacaacgagaccaagctgcgggctgagctggtcgcacacctcgacgagctgatggctgctgtcgagactgccaaggccaaggtctacgcgtagtagttcaagccgagcacctgcatagtcgggtgctccactggaactactggaatttttattgagggtgtgtgtgggctgggttggctggtgtgggcgggagtagttactccgggtctaattttggtatcgtcgtgtgagaaccctcccgactctgatcagcccacccttccccccgtaggccctcgtctggtgggccgctgcctcgcattgcctgggtgttgctgcctagcctcctgggagcttccggcttcgccggcggtgcggtgggcttccctgcccgtcgccgaccattctacacggctcggcgggagtgtcaacccttgggctggccgtagtgcctggagcgctccagcgcgtcgcgatgcttggccctggctacctcgtactcctgggatgcctgccgcttcctccagggtgctgcgtagtgccggtggtcctgggtagcccactgtgctagctgcctctgccatgctgcgtcgtgctggtgccaggctcgctcgcctctgtcctgtctgctcagcatcctctgtgcctcctgtggtggtcctgtggtcctgtcgggtggtggtgcgggagtggctagccttgcctcttgcgttgtcctgccgcctgggtgcttccctgggtattccctggggctgcctgggtggtcctggctttgcctggccactccctctaggccacgtactctactcgcctctacctgccttgtctagtcctgctccctgggtctgctccctgtcgctccctgggtgctggtctgtctccctggcgctacactggtcctgctgtcttgcctcgccgctccctcgcctgctcggtcgcacctgcggcgctgatggacgcctatttgtccattgtgtgtgacataaccgcagccttagtgccacgcgggtttcagggtggtggtcctggctgggtggctgctccctgggtggtggatttgcgttacctgggaacgataatcctggctagccagactaagcctcgcacgcgtgggtctctatacgcgtgggaggctccagggagcgcctggcgagggtattgacacgtgggcggcaggtctgtagagttcgccctgtcttcacgcaataccgcctccataggcagcctggagacagggttgacacactaccaaggtatcggtagagtacgcagccagaaggacgggacaacgcaaccttccaagcgcggcacaagccataggcgcaagggacacggcgaggtcctagggcgagacccactgagtgtaaggccggcaggcatcgcagaggggattgacaaggtaacacaatgctgtaagatgtgcggcgtcaagtggtcccgatgtacacactgtgaagggattacggcgcggtcagacagatgaccggcaccgcttgacactgcaaggctcagtcggtacgatgggcacccatagcggacgtgatggtccggggcgatgcggataggacgccttgtttataacctgaccgcaaagctgtgactccagccgataggactgacccaccacgtaaatacagacgggttgacacgacagggccgagtcgataacatggccgccacaaagggaagcgatagcttcctggcggtagaggttcgaagcttcaccagcggtacatggactggtgcggtaggttgactgaagctgcaactggttaggcagggtcccagggaatacctgtcgggtgctgaagactcacccaaaagagtctgagcgggaagcctccccgtccacggttaagcaaaggcacgttagtgccggtgggaacgaacagagtgtcagtgggatcgagaactagaaacctcggttaatcgcgactgacagtatgctgggtagtatcggcgggccgattgaacaaggccaggcagatagcgcaaagggtacgggggaagagtgctgacgatcccggatagtatgcgcaggacaagccagaaccgctgatactacagggactatgccaatgccaaggtttgtcccttgaggcccttccaccgaggggattcaagagacagacctagtgaggattgccgatggcacacttcaaggctaaggctcccaagtcgccctttgctgctcaggtagcgtactggcgggactgggaagccaaacgtactaagctcatcgcacaggataacgtcgaagggcgcaaagagcttcgcaagatgcgtgacgtgcgctatgctaccgacccggagccagcgccaggacgctaccacaaccctgaacagaaggcgttcgtgaagggtagcgaaggcaaggcgcggaacatcctgaagggatggaacgctaagaagtcgcaagggaagggtttgtaatgccacgtgtgaatgaactgacgccgcgtcaacgcaaggccgccaaggctcgccgcgacaaggcacgccggattgatctagcgcacaagatgccgaaaggcgccgactgcccgatcttccgcaaggctgaacaggcgcaagctaagcagccccgcgtcgataccctgaccactccccgcagtaccggctacctggtcgccgctgcttacctgaacaaatccatctgaggtacataccatgaccaacgcaatctccaaaaccgtaatcgcattccgtggcaccgaagagatcaaccgcgctatcgacgccatccgtgtccgtggcaaggaactggacgaagccatccaactgaccggcctgtcgatcatccaccacatcgaccagtgcggcgacgtgaccgtagtcaaggcgctgtatgaagccatgccgaagggcagccgccgcaatgcgctggtcgagtggctggtgctgcacggcaaggtacaggttaacaccgacaagaaatcgaacaaggacctgcccttcctgtacaacaggttcggcaagaccgatctcgttggcgccaccgacaacccgtggtacagcttcaagcctgagaaagcgctggaccaggagttcaacctggccgctgccctggccacgatcaaaaagcaggtgctccaggcgcagaccaagggtaaggtgatcgttggcatggaactgctgggtgacctggaagcgctggccgccaaggctgcgcccatcgctgagcagagcaagcgtgctgccgcccattgactcaagtcgaacgcctgctaagcgggcgttccgctggaatcaatgacaactggagaaacacgatgagcttcaaacaacgcctgcaacgtcaaatcgccctggcacagtacagccgcccggctcagttcccatatggcgagcaagccgtccaggcgaagggggagtgaccatggacttctggatcgcccttcccttcctcgaactcggcctcaacctcggcgaggatgaactgcgcatgttgtggttcagcggcctgacggtattcttcatccacctcctgacgcggtgactcaagtcatggccctggcgggcgaccctcgcctactccggggccatcgctggactcatcacaagcgagaactaaaccatgcaagctttgaataccctgttgattgcaatccccaaggacccgaccgcaggcatgcacgccgccgacaaggtgctgtgcgcccacggattccgcatgggtgacctgaataccgcgcacgtcctgaccccaggcgggttcgtggtagtgggcgccggcgtgactgtgaaccgctatgacgaagcgtatcgtatgagccggaacctcgactccgaaggcttcgacgtgctgctggtccatggcagcccgctgtccgggcgtgtcacctgccaggcgtacggatggatcaacgctgaataccgcaagggctgcgcgaacgggcgcccgatcttcgacatcgcaggaacctcttaccatgtcctcgcgtgatccctaccgcatcggccaccgcgtggggctggtgaactacagcgaccgatacctgggtgccgacgcggcaggcaccaagggcaccatcgaagccataacccgaccgtcccgctgtatgacgatctaccacgtgcgctgtgagcggaccctgcgcctgatcgaggccgaggcccgcaacgtgcgattcgtcagacagctaccgacccgcaaatgacgtggctcatcatcgctgtcagcccatcaggtggctgcgccttcgtgtggagtcgcaagcggcctgtgcgcccattgcgattctactcacgcaaggcggctaaacgctggcttcgcaagcatcgccgaacggcctcgctcggaagtcggtatctcatcgtgaactggagcaagcgcttatgaactacactgtacgtctcaaggacggcacgtcccgcaaggtactggccgataacgtcaccaccggccacgccttcgtcgaactctggctccacggcggcgttatcgccatctacccggcctgcgaagtgcaggaagtgtcccgcatcgacctcgtacaggagggtgagtaatgaccgtccgtaccgtgtacgtccgacccgaagacccggcaccgccggtattgtccgcaggccgactgatgcctggtgaactctaccgtgtggtggcgccttccgaggccgaaggcgtcatcgtgctggcaacttccggcccgtggcatgtccgatccgtggtgctgcacagcatgaacccggcagtacatcctgtggggctggccatcgtggacgatacctggcggttccgccggctgggtgaaggcgagtacctcaaactcgtccaaggggaggaggactgatggccgtggcaatactcatcctggccgtgtggttgatcggcggcgccctgctattcctgccgttcgcccttggggtctcaccgcgcttgccgctatccgacgaggccctcaaccgaaccgcactgtacaccgtgctttggccggtaaccctacctaccctgatagccgtaaccgtggttgtcatgctgcattccgcgtacaggggcgccatcgaactctaccaggagatgaaatcatgatccgtacccatacccacaacgtcgagcgcacaccgcaccgactgtaccggcacactgagctggcgtctggcgagctgtaccgtgtagtgcagcccgactccaagcgcggcacgttggtggtcggcgtagcggcctgggacagccagggccggcccgcagtgctgcccgtggtcatccatgacgatggtgacgccaaggtgacctgcgcacgtcctaccgtactgcgcaacgacgggtggcgcatggtcctcgccgacaaggggacccaggtgacactcaccgccgagtgaccaaggcgaaggctggtgcgccagccttccaccgtggccattccctgccgcgaaccaactcaactgaggagctacaacatgaccaacgtcaacaccaccgagaccaccgccgctgctgtcctgggtgccaagctgatcaagaagccggccaccgtcgaggacttccgcaacaacgtggtcttccaccatagcgccctgaccaagctgaccgaggtctacaacgaagcggtcgccgccctgcaaaccgccgagcgcctgtccaacctcgtcgccggtgacgtgatcaccttcgaccacggcaagggcgagaaagccgaaatgctgagcggcgaagtcatcagcgtggtcgccggagtctatcaggtactggtccgcttcagcgacagcgcaccggccaagctgctggacgtgaaggccagcgccatccgcgccgtccagtcgtcggcagcccaggccgcaaccctcgacgaagccatcgccgaaggcgagtaaggcccgcacgtaataggcccggccctccgggcctattgcgagctagccataccataggaggagtcaccatgagcaagcgcaatcccggacacatcaacggcaccgggcgtagcgtcagcgtttcatcgccagcggccacccaggaactggaggatcgtctggcggctgccctggccgtgtgccagcagcgggcagaggacatcgacctgctgagccgccgtctccaggcagccgagcgcgcacgtcgctgggagatcgacgagattcgcaaccaccaggcgaccatccgcctgttgcagaacgacctgaatgctgcgcacgatgcccatgaggcacaagagcgccgcgctcgcaaggcaaccatcatggcctgggtatgcctgctgaccgcaggtttggccgtcaccctgaagctggcaggagtctgaccatgcagtgcaaagacctttacacgaacctcgcatcggacatgttcagcgtaccgtgctcccaggtgactccggagatgcgccgcgtggccaagcatcgggcactggcaggtagctacaccgcccgaatctcgggcgtgcaggttgtcgatcaggcgtgctgcaaggaaggtaaggtgcgcgtggacgtggtggtggaccacgtggaacctcagcgcaaagtgtgcaaacatcgtgcgctgggtgcggccttcggtatgcccgacatcgaggtgacacctaacccgaacccggccgacttcaccaagatcgaagagcgtgtgtcggccatgtataccagcaagagcgacaagcaacgcgccgacgagtacgaggcaatgctgctcaaggcattccctcacgtcctgcatggccggcgtgaacgtggacgccctctgatggcaagcgacttcgatcccagcctgcgagctatgcgcggcgtacaggcgaaaatcctcaaggtcctgcgaggccgtactcccattggcccgctctcccgcaggctcgacaagctggtagagctggcagacgacgcgaagtggcgtggtgatcagttgcagcgggtgagcacggacctggcggcagtctctaaaagactgtatcaggcgaccatggccgtgggtaagctgcgggatgtgggtcagatggttggactgccctggaacatcggtttcgacgaccatgacccggctacccggctggaggcattgcagcgtgctatccgtggcaggcgcttcatctgcgccagtcattcgagcaaggtcaaggcggaagctgccgaccaagttgccgaggctaagcgtaaggcacgcgccgcagtaaaccacgccgcgttcgcagcaggcatgatcggactggtggtaggtgggctcctcggcgtaatcttcgcaggctagggcctactccggggtcaaatctgagggcgttcctagagcgccctctcgtgtgagtctggaggatcacgagcatgcaataccacttcacgcattacaacggataccgcttcggcgtcgagctggaggacgaggctgtcttcccgtgcatcgacggtaagcgggcaacctgggacaaggtggcggcgtgtgccggcagccttgtgcattacatggcgcaggacctgattgacttcggccagcgcaagttgagggatttagaagatgagcaagacgagcctgtatccgctgagcctgcatcccggcctgattcaaatcaggacgatccacgtattcagcatccaagccccgagcaacgccgagaactggtggcagtggttcctctggcagcggaagtaccacccgctccgggaaagcctgagtccagccggggagctgagtgcgagtatcgccgagtgtgtgctccacctccgccggagtggctggcaagatagcgacatctggcgcaagaagggaggcgtgctggccctcggtgccttcgacctgtcaggtctgatggtaggttcctgcctcgtagtgggcggtgaactgaaggccctgtgcgttgatgatcggcacagcaggcaaggtatcggcgctgagctggtgcgggccgccgagctggcgggtgccgagtatctgacctgcttcgagttcctggagccgttctacgccgacttgggctggagcaccacccaccgcgaggcgaactggacagcaggagagccggacgtgttgcacatgagggcacccggccatgacgtatgaggtgatgacatggcttatcgagaacaaaccgctggtcatcggagtcgccttcagtctggtggccctgggcgtgctgctcacacagaacaacggcggcccgcctacggcgcccgcatgacctggcacctccaggacatgttcgaggcccgaggtgggctgcggcctttgtgggaggaatggtaccaatggcactgcgccgtgactcctggctaaagcaagcgcaatccctggcggttgggcaggtaggccggttccgacacgtcctgggatgcaagagcatgagccggggcgggaccaacatgacctgcaagaacctgcctgaccgctgggtggcttactgctactcctgtcaggagggtggtgtggtcgagaaaacgcatgtgcggagggtacaatgcgcggatcaagaacgcttcatgccctggcccgaggatgcctcggactggacgcaagccgactgctatcaatcgctttatggtttgctgctgtccaagggtatcgactacaacgtgatgacgccagggctgccgctgctgtacagcgaaaggcagcatcggcttatcttccctaccaacgcgggctggattgggcgcgctactgccgaccaaaatcccaagtgggtgggctacgggtatcctgccccggattaccatggatggccccaggaattatcaatgggcaggccatgggtgctgacggaagactacttgtcggcgctgaaggtgcggtgggcctgtcccgaagtctttgctgtcggtctgaacggtacaaggctgcgcgacaggctggcggcgatcatgttgcagcagacctgcaagcgcgccttcatcttcttggatggcgacccggcaggtgtccgtggtagtgcaggcgtgatgcgccggctccggtccctgcttatcgaaggccaagtaatacacacgccggacgggttcgaccctaaggacctgacccgcgagcagataaggagcctagtaattggacgtattgacgctacacgcactgagtgacaaggaccgcttccgcacgttgcggagtgtggtgcctgaagggatgatggggccggagacgtgctttgtcatcgactggatcgagcaatactggaaggtctacccagcgcatcagaaggtagacccgcaggcgctgcgcgaactgatcaagctgcgaggtggctaccagccggaacaactggcggtagtcctgaacctcgtcaatcaactggacaagccggtggacccggactcactacaaggcgtcgtgtcccagctcaacgaactggatttctccgggcgggtagatgccctcctggcgcagtacaaccagggcgaagacatcgacctggcgtatgagctgcgccggctgagcgacgaggccctgcgccgcgagggggtcagtacgccgaccgactatgtgacggacgacgtgtttgatatcctggcggaggagcagggtgaccacggcatcaagctgccggggctggtgctgccggcgtacatgaagggcctccacgccggggcctcggtgttggtggcagcgccgcctgatgcgggcaagacctcgttcatggcctggatcgctgtccatatcgcgccgcagctcaagcggtacttcgaccctgggcggcccatcctgtggctgaacaacgagggcaagggccggcggatcaagccgcgcctgtactcggcagccctgggcatgaccgtgggcgagattcttgccctggacccggaggaggttcgcaggatgtacgccgagaaaatcggcggcgactctgagctgatccgcatcaaggacttccacggcgggtccctggcccaggccgagcaggtcattgacgcgatgaaaccggcggtggtgttttgggacatgatggcccacgtaaaggggggtcagcgcaaggaccagaaccgcaccgatgagatggagtacaaggtggccgaggtccgcgagatggcggtgcgccacgacttcatcagcttcatgacgtggcagattagcaacgacggtcacgaccagttgttcccaccgcagtcctgcctcaaggattcgaagacggcggtacagggtgctgtggacgtgcaaatccacctgggccgtctcaacggtgcggatcaacaggtcatgcgcggcctgtccctgccgaagaacaaattccagatggacgggaagccttcgaacgtggaggccatgattaacttcgacgccgcgcggtgtcgtttctttgagagtgtagatcatgcaagctaagcatagccgggtgctcgaaggcaccaaagaaattccgctgggtggcatcgaactgttaccgggcaccgtcgcgggcctgctgttgtgcctgtactccgacgcaactcacgaggagggcgtcgccttggccggtgggttccctcgcgacttgctgcacggcgccactcccaaggacgtggatgttgccctatatagcatgacctgggggcgggcagagcacctgatccagaaggcactcccggtcctgaaccccatcttcgtccgggatggtgggtggcgctcggactacgccgatggcggcgacggtggtatcttcaagggcgtaatgtcccttgtgggctgccgtgggttgaatggcatggacctggactttaactactacgacgccgccagccttggccgggtgatggagtcgttcgacttcaccatcaatcaggtaggtgtcgcgtacaactggccggaccccgaaggcggcccgcgtctgggtgcgtacctgcacaaggacgttacctggggcgtgaacaaggaagtcggtgcaggctcacgtctgccggaacgatgcgagaaaatgcgagccaaggccgcgtactacggatgggagaacgtgtgatgagcaagcgcgacgtggtattggatatcgagaaaggcatctggcgcggcgtagaccagaacgacaaggccgtcgaggccatcatcaagaagcacgggtacgtgatcgtcgagcctaagatcgacgggtgccgtgccatcgtgggtgcgcatggcgtggtatcccgcagcggccgccgcttccctgccctggacggcctggaggatcgcataatcgcgaaactgtcccagtccggcctggactccggtctggtgctggactgtgagatgtacctggaaggcatgcccttcagtgaggcgaccgggcgtatggcccgcaagaccccgctgaccgaggccgagctgaagtgcctgcacttcgcggtattcgacgccacccatatcggcgtgctccgcaagtcgcgcaagtcccacctcgtgtacgatgagcgccgcgccatggtccgcagcctcatggaagattgccggcggggcgacaccccgtacttcttccaggtagccgcacaatcctgccgttctatggaggcggtactacgctggtacggctaccaccgcgccatgggcttcgaggggtcgatggagaaagacccgagcctgacctaccgcaacggcaaggttgctggctgctacaagcgcaagccggagatcaccgtggacgggcgtatcgtcgggtacgtgatgggcaagactggcaagaacgtgggccgcgtcgtgggctaccgtgtggagctggaagatggttccggcaccgtggccgccaccggcctgagcgaggagcacatccagctcctcacctgcgcccacctcaacgcccacatcgacgaggccatgccgaactacggtcgtatcgtcgaggtctccgcgatggagcgctcggccaacaccctccgccatcccagcttcagtcgcttccgcgacctggccagtaacccaggagtcaaggtatgagaatgccaaccgaagaagaacgcatgatacgctgtttactggcggatatccacgagccactggacctgctgttccccggcctccgtaccaaggcccatatggacccgcaagcagaggaactgtcgattcgaattgactacgaccatgcgaagctgggccgtatgggattctgccacgcggtatccctatatcaactgtccatatatggccgcgaggggatggtccgctacctgatgcaggagattccccgccgcgtgctggaaggtctgctggtcaaggcgcagcagtacagccaaagcaactggtacagcaaatgacgactatccgaatcctcgacctcgaaaccgagagctacgagcacaaagggcgcaaggcgtcgccctttgacccccgcaactacatcgtcatggccggctggcgtgacgacgttgacggcaaggtcggccagaaggtggaacatcgcttccgcagccgtgccgaagccgaagacccgaacaaccgctggttcaacctcgacggcgtggacgtgatcgtagcccacaacgccatgttcgaatcgaactggttcttcacccgctaccgggacgagtacctggccttcctgcgacgcggtggccgggtctggtgtacccagcaggccgagtatctgctgagtcatcagacgtggctgtacccggcactcgacgagctggctccgaagtacggcggcacccacaaggtggacggcatcaagatgctgtgggaccagggtgtgctcacctcggagatggaccaggacctgctgagcgagtacctgtccggcccgtgcggcgacatcgagaataccgccctcgtgttctacggccagttgatgaagcttcaggcccgtggcatgtgggctggctacctggagcgctgcgaggccctgatcggtttctcggcgatggagtgtgccggcctgaaggtggacctcgaagtcgccaaggtgaaccacgccaagcaactggaagaggtggccgggatcgaggccgagctgaagaagctgatgcccgacttcccagaatacttcgagttcaagtataccagcctctaccatatgagcgcatggctctacggtggcgaggtgcggtacaggggccgggtgccgtacgaagatggccggatggagaaagccgacttcgtgcgcttcggtacggccaagcgggggactccaatcgagagtacctcagtgcgggtcccgatccacgaagtgaccgaccggggtgagtggcactggcccaccatcaccgagctggcgaccaagcacggcccggtcatcacgttctccgctggcaagaacaagggcagtgtcaaggtgttccgggaggatacggacatcccggcgaccaagtgggatgatgaccagcgattccggttccccggcctgatcaacctgaccaaccttccggaagtagtgcgtgagaaattcctaggcaaacgcccggagttccagtgcgccctcaccctggcggatggatcgcccgtgttcagcaccagcggcgacgccctcaaggctctggagaaacagggcttcgaggcggccaagctgttgatgcgcctggccgagctgcacaaggacaactcctcgttctacatcacccatacctacaacaaggatgggacgattaaggacacgaaggggatgctccagtacgtggacgacgacggcatcatccaccattcgctgaatacgacggcgacggcgacaacgcgtctgtcgtccagccgcccgaacctccagcagctcccgtcgaaggacgaggacgacccggaagccggcagccgcgtgaaggagatgttcgtgtctcgcttcggcgcggacgggatgatcggcgagaccgactataccgccctggaggtggtgatgttggcggccctgtcgaaggatcgtaacctcctggcgaagctgatggccggcacggacatgcacttgtaccgcctggcagggaagcacaacaactggaacgggttcgactacgaccagctcgtgtccatcaagaaggaccccaaccacccgtggcacggtcgcatgatgcaggcccgaaagaacatcaagcccaaggcattctcggcgcagtacggcgcgagtgcggctggtatcgcattcaacaccggctgtaccgtggaagaggcccaggaattcctggataacgaggcggccctgttccccgagtccatcgcattccggcagatcgtccgcgacagtgcagaggccaccagcctcgtcatgtacaaggccgaggaccagatgccggcaggcgccttcagcgagatggggccggatggcaactggcgccagtaccgccggggattctggcaagcgccgggtggcacctgctacagcttccgccaacaggagcgctgggacaaggaacagcgcaagacggtcatggacttcaaggacacgcagatcgccaactactggaaccagggcgaggctgggttcatgatgaccgtgagcgtagggcgcatcttccgttggatgctgcatcgcccaggattcatggtcaccgagttcctgatcaacaacgtacacgatgccgtgtacaccgactgccacaaggacaccgccgccgaggtcaacaagggcgtgcgcgacatcatggccgacgctgcccgctacatgagcgagcgcctgggctacgacatcgccgacgttccgttcccggcagtggctgagatggggccgaacatgttcaatatggaggtgatccagtgaaagaactgcacccgctgcacacgcctgagttcgtcaagacattcctggaccagaccgggtgcctgccgggagtacgccgtacgggccgcaccaccggcattgctctacaggccattggcatggcgctgtcccatccgagggaaaccctgacgttcgtggaccacccggacggcagcgcggcagcactggtggccagcattgaaaccatactggcgaccttgggctacaagaacgtcctcgttcgacccacaacccgtgcggatgggcgcagcgtgagcatcgtcttcaagacgctgccgaacgcctgacgacccttccctactccggccttaaatcttcatccgacacgagagagaccacgcatgactcaacaactcaacgctctgcaagccgccctcgccctggccaacaaggctgccgagaccgcaaccatcgacatgtccgaaacctccaccggcggtggcggcggtcgaatcttcccggcgggcaccgccatgggccgcttctgcatctacatcgagctgggtgaccacgccaaggaattccagggcaagctcaagaacccggcgcctcaaatccgcctgggcttcgcactgtggggcgacgtgaacccgcaggccggtaacccgcagagccgcccggacgacctgttccacacttacgaggccgacggctcgatcaagcccggcctgttccgtaccttcgagatgaccctcggcaacaacgaaaagtccaagaccaagctggccttcgacaagatgaactggagcgggcagcatacccacttcgctcagatgctcggccaggcgttcatcatcccgatcaagcgcaccaagatcaccaagggcaacaacgccggcaaggaacgcaacgatatcgattggggcggtatcatgaaaccctacaacccggtcgatggcagcccgtacaacgtgccggaactgccgatggacctgttgcagtatttcttcttcgacgcgccgaccaaggagacctgggacgccctgtatatcgagggaacctcggacaacggcaagtccaagaacttcctgcaagagaccattcgctcggccaccaacttccccggctcggccctgcacatcatgttgggcggcggcgacgatctgatcatcaagccgacgacccaggccgcaggcagcaacctgccggcagtgcccaacgtggccgccgacgccggcgtagcggcagcaccggctgtcccggctgttccccaggcagtggctcagacggcccccagcgtgccccaggtggcgaatgtggctgcccctgtggtaggtactgccgaggcacagaacgtactgcctgacgtgccccaggtggctcagacggcggctccggcagcggtcgaagtcccggcggtcccggtagtgccggcagtaccgcaggtctaatgcgcctgccatcggaagagttcctggcaggactatccgcgcagtttgaccgcagcatggcaggcgggacgttggtgtgtgacgccgacggacccgcctacgtggctgcggccactgctaagaccctggacactgcactccgaagattctggaagctcattttggagcagcagttcctagcgcactgcacagggacacgggttcacctcacggcagcaggtggggcgaaggcgtaccgcgacacgtatccgaccatgaaaccgtaccagggccagcgcaagggcaaggcaaagcccgcgctgctggagccactgcggcgggccgtggcggacgtgcatgagcgaggaggggcgccggaggggatcgatgtcatcctgcacacgttcttcgaggcggacgacggcatgatgatggacgcctacgccatgcaggacaaggccatcatccggtccgacgacaaagacctgcggatgacgatctacccgtattgggagatcgatacggcgtgtgtgagcaggatcgaaggcggcttcggctacctcaaggaagcgtacacgccttccggccagttcaagctcaagggccatggacggaagttcttcttggcgcagtggctcggcggcgacaccgctgacaacatccgagggatcgatcgattcaacggtaagctctgcggtatgaagacggccttcgacatcctccatccgatcacggatgaggacgaggccatcgacatgatcctggaggcgtacgccaagatcaagcaaaacccgctggcagaggccgaggtgctgtggatgcgccgaacgcctaccgacaacgcagcgcagtatctgttaagccgcgaccttcgtccggccttccgccagtggatcatcgagctggacgcctaccacgaggcgctgctccagaagcggagggagagcgattatgacgagtgagccgaaggtctaccggataccgcgcagtcaacagcgcaccttcaccctgaagctatgggccgagcagaacaagctgtgcccgctctgcggcaagcccatcgatatcagcgtgaagggcgaagcggtgatggaccacgaccacgaaacggggctggtgcggggcgtcctgcaccggtcctgtaacaccgcagaaggcaagataacgaatgcggcaggttcctgggggtgcaagtcgatgaagtattcagacatcatcccctaccttcgtgcccttctgacgtatctggaggggccgaagcatccgctgatctaccccctgcacaagaccgacgaggagaaacacgaagcgaagctggccaagcgccggcaggcagccgccaaacgcaaggcggcgatggccgtcgcaaagcacaacgcgaggaacgtatgagcaaactccgcaagcaattcaccaatgagtacctgcgcaacgtctatgtcgagctgggcctcaagaagggcgccgagcatctgaccaggcattcgcgcttcggcgaagtgagccgccagtgcttccgcaactggtgcatcaagctgggcttccacgacagcaggacacgcggcacgtacgccaagaagggcgctctgcactggctgggccgaaaggccgccgaggtagtgcgcaagttccctggcgccgtgggcaacgtggttggccagggtccgaaggtactgagcctggacatcgagacctcgcctatcgagggttgggtctggtcgctctggaagcagaacgttggcctcaaccagatcaagcgggactggaccattctgtcgttctgcgcgaagtggatgcacagcgacgaggtgatctacatggactgccaaggtgatcccttggacgacatgcacctgctggtcgccctgcataagctgctggacgaggccgacatcatcatcgtccagaacggcaagcgcttcgacgtgcccaagatcaacgcccggttcttcctgaacaaaatgccgccgccgcgaccgttcaaggtgatcgacaccttgatcatcgccaagcagcaattcgcgttcaccagccgcaagctggagtacatgacccacaaggcatgcaccatcaagaaacgcctccacggcaagttccccggattcgacctgtgggcagcctgcctccaggacaacccggaagcctgggaggagatgcgcctgtacaacatcgacgacgtacgatcgatggaggagctgtacatcctgatgcgcccgtggttcgtcggccatcccaacgtggccgtgtacttcaatgacgccgagccgaccatccgctgcccgaagtgcggcgacacggatgtcaagcaagagggctgggtgcatacgcagaccggcaagtacgagcactatcactgcggcggctgtggtggctggagccgggggcggtacacccgcaacacctcggaacagcgcaaagccctgctgagcaactaaggaggtagcatgagcctagcattcccggactcttacgagtcgacgatcacgactgaaccgtaccgcaaaggtgcgagtctggaagaacgcaaggtcggcaagcttcccatgcacctggtagtcgaggggttcccgctgctgaagcgggagcttgctcgaatgatgcaatgggccgccgaggtcaagggctacaagccgcacgactggaagaagatgtcggttggcgagttcaaggccgcacagcatcggcacgagtccaagcgcctgctggacgggccgctggatgacgagtcgggcctcatgcacctcgtgcatgaggcattcaacgcaatggctgccgccgaggtggccctgatggaccgggagaaaggcaatgagtaaaatctgttggtgtacccgaccgcacgagaccgatgaaggtgttcgggtcatctgggccttcaacgagcggggcatcggggtcaactacgtcacagcgtacatcacgccggcgatggtcagccatcgggactggagcgatgtcatactcccgaacattctccgggagatggcggagcgcctggagcgggaagtgaagctggtggaactgcgctggttccgcgctgagattctgagctgcggggaatggcgtgactaccgagcgatgacgctggatggggcggttagcctggccgaggccgagtggggtcccgaggatatcgggcgcgtaatcgaaagacgataggagatggaatggacctgatacagcagcagatcgcccacgaagaggccctggtcggggcggcgcagaatgacgcccgcattgccttggaaaaggcgattgcccaagggtccatcgaccgcatcccgagggcgcgcatcatgttgatgcggatgctccccatcgtgaccgaagcgatcttcgcccaccaggaagcgaaggcggcggggccggcagcgaagctccggcacctgctgcggatcatcgacgcccaggacctcgcggtcatggcgctgcgggctgggctgtcgatgctcatcaactacccaacgatcacagcgacgaagtattacacccacatgggtaagatgctctgtcgcgagatcgaagtgcggttggccttcaaggtcaaccaaccctattacgaccggacgctggactacctcaagaccagcaggactcgcagcgtccggcacatccagaagacgatggacgctcttctggacgcggtactgccggaagaggcacgtatcgacctgccggatggcgactacctgcgcctcggcaagttcatcggcgatccgctgatacagtgcggcctgttcgagccgaaccgcttcacaggtcggggcggtacgagcgtccacctggagccgtcgccggaagccaaggagttcctgcaagacccttcggcggcgatgacctggggaggcccaggccgtagcgtgatgctggcaccgccgcgaccgtggaacgactggtgcgatggcggttactacagcgctaaggcgcagaagcaccatgtgctagtgcgccgtaccaagcaccagaccaagcgggcgcgccagatgcagctacgccacctgggccgggacaagatgcccagggtgtatgaggcggtcaacgcgctgcaatcagtggcctacgagatcaaccacgacgtgtacgagatcatcgagcgcgtcttcacttccggcggcggtgtgctgggcatccctcagcgcacctacccggacaaacctgagttcccgctcggcgacgagtgggccaaggagaacgccagtgaacaagagctggaagccttcaaccgctggaagcgatccgtccaccgatggtacaccggcgagcgggagcataccgccaagcttcgcgagtttgctgcactctaccgagttgttcgagagcatcatggcaaggcagtgtacttcccgatgcacgttgactcccgtggccgcatgtactattggggcacaccgaatccccaggggtccgacatcgccaaggcgtgtctgcgattccacgaaaagcgtgccctcggtaagcgcggcctgtactggctcaaagtccacgtcgccaactccctcggatgtgacaaggtgtacttcgacgaccgggcggcttgggttgacgaacgctgggacgacttccagcgagcactcgacgaaggcccggagaactatccgggtctcttcccggaagacgagtcgcccctgtgcgccatcgcaggtctgctggaactgcgggcggcttacgcatctggccatcccgagcgataccagagcggattcatcgtccacatggatgcaacctgctccggcctccagcactactcagccattctgcgagatgaggtcggcggagcatacgtcaatctcctcccgcctggacttgccaaagctgacatctactcccgagttctcgcactcgttgcagagtctctggcacgagacagagagggtgctgaaggcgaggctcggggctacgctgtactgtgggataaggccggtctatcccggagcctgacgaagaaaccctgcatgacgttggtgtacggcaccacattcaagggcgtggtggaccactgcctggactacctggacgagactggtctggagattcccgagggtatcccgtcataccgcctgggaagctacatggcaacgctcatactggacgcaatccgcgagacagtaccctcggcagtcttcgccatggaatggctccagcggctcgctaaggcccttcctgatgcatccaaggatttgcactggatcacgccactcggtatgcaggtcttccagtcgtacccgaagaccgaggaggtccgggtgcggctgcgggccgaggctgtcgagtacgtcaccttgtacgaggccaaggacgagctggacccggtacgtaacgccaacggcatcgctccgaacttcgtccacgggctggacagcagccacctgggcctgacggccctggcctgtgcggcagagggtatcccgatccaggccatccacgacagcatgggcacctatgcggcagacgtggatcggatgcacgtccacatcagggagcagttcatcgccatgtacagcggcccctgtgtgctcgtagaactggcaaaacagctcgggatagaggctaccccgccccggagaggatcgttgaatctggaggctgtacgggactcctgggcgttcttctgctgaggagattatgtcacccacataggagcaagtgcatccgtccaaggccctcgtagaggggagcaggaagagagagagagagaggtcagggaagaccagagggtagaagaagagtagaggtagagtagaagatgagactagatgactatgaaggattctagatagaatagactaaccagcataggagatatgatagatggctactatgaagacccaccgacctacggttatgtcacccacagtggaaggatcgagaacaggcaagggtacggcccgtcctgtcacgttcacctctcagcagatcgagtggttagaacagaccttccccgaacatcagatcggccctggaaccacgatggaggacatccagttccaggccggtaggcgagacgtggtgcgagcagtacgcctgcgccgacgcgatgccatcgcagtggagctgaagtgatgaacaagtccatctggcgagtccacgcaaaggccggcactccctcggaactccagggcctgtgctggctggcgatacaggagttggaggagttcaccctcttccgctcgaaagacgacgccctgaatacgatgctggatagtatcgagggcaatgatcgaaccgagctgctggtattccgcgacgggcaattggccggcggtgcctgcatcgtgttcgaggacgacccccacgtcggcccgtgcgtcacagcacagtggcagtacgtcctaccacgctaccgcaattcaggtgtggttcgggagttcatccgcgaactccaccgtcaggctggctggggtcaaatccccctcgtgtgctggagccatcgtgaaagcgatagccggtacacgatccactaccggagagccaagccttatgggcaagaaagtaaagaaggtgctgggcaagaccatcatcggcaaactcgctgatggcctgctgggcaccgacctgagcggcgcacaatccgatgcccgcaagatggaa

SEQ ID NO: 6 - DNA, 43344 bp, Unknown
  source: /note="Description of unknown: bacteriophage strain capable of infecting bacteria of the genus Pseudomonas"
ttattctccttcgggctttaaatatctactggattctccagtgtttatgaaatgggttcgctcagcaatataactggctagtataccagccttagaccaagccccgttataaagtctgctcagacttcgccaaccatcttgctgctccctgtccatatctactattggcctacaggaccggcaacaataggttactaatccttcttctatttctcccagaatctttccgcagtttccacaaactactggcagctttgcataacctatctgattagacaactgcctggctatataggtgtcatccgccatcttagttaacagactttcatgtagggtcttatcctctttgtaccggagtttaagatcccatatgtaaaatagattaactattactaggctaggaacctgcaaagttgttccagggattaagaagttcatggtctatccgactaattagaaaggggtcacacatcgcattatgcggctcgattgcaaaatgtgcaacccccgattttctttaatcctactagagggattaaagtgagatgcctatgataagacagatcacgagtatttggacaactcgacatactactatgcacttcgtcaagaaagcccgcatgtgaatattagcgattatcctatcccatcgtccctcggattcttcttccttccaccagggttctgatagattgtgatagatagctgctagctcatcccttttcatccttagtaggctgaccatgatggttgccagagccagaactaggataaggctgagatggattggatagaattggattaggcccaacagattattgaggttcattataattctctcccggttgaaaggacggccaagacagtatcagttaccagtagacttgtggtaacttgatctattgttattgccagtcgttctagcatctggccttttctagagtctttagctagcccggctgctcgactgacttcctcttttaactggaacaagtttccatagctagggtaatcctttttcaggaaggtcacctggtcaagctctatcaatagtttcccaatctgccatttctcaagtctgctcatcaatattctccgttaataattaatagggttttaatctctacgttcgataatcctccaaaggttcccaggaatgagcattctaatttatctgtttcccagattgcatctacgccatgagccaggagttctatccctagacttgcaagatcggcattacagcagttatggaattctttcagatggtttgccaggaatatcttcaactcagtcatgaagagtttaggataagtaggattagctggcaactttatatagaataaggctgttccctccactactggatagttagctaggaaggttactttcaagatgaaggacgtgatcatttcatgttctcctttctccaggcgattgcaatcttagaggtttcagaatatgccttgcataggatagggatgttatccttagcatcatagaagtccctacctattgggttagatatcttaaagcagaagggtcctgctctattaggcttatttgctgatgcttcaatgtatatgtccccacatacccaagttacagtagcgagtaggatagacccttcctcaaagaaacttggataagggcattctggagtgattttaattaggactttatccccagttctaatctggccgtaccagttttgccagtagcctttagtagtcattgcagttctccagtcagaatgaggttaagcttttcgattacatgttcaggagttatctttgagaatggtacagggtagaagctatcccagtttccaattgtatattctccgtagactaaagcataggccaggtcattagaaatctctaggaaattcttaacagcagcctcgttacaatgttccttatatttaggcttttgaaaggcactaatattccagccaggaattccagagattgccagataccctgcaaagcaggcagtgtttccgcaggcgtgaagatcttctatagagagtgccataattgggggtgccacataagcatttctactgtcagcttgccagcttctcatatctaggttagttgcccgttccattacttgaattgccagttttacattctcgatattagccattgccaggtgcctattgggttgagttaaattagactagccccagactaatccagggctagatcggctaaggaggaactatctgaaacgctgattggaaacctggcgcttagttctgattctatctagatcctccttttcctctttgcgaaaacgggccttgagtctaggataaataactccttcccagtcatacccgttttcccacatatagaaactggcaatctccttagctgctgctactattctattctcagttaaatcaatggtgttcaatgaaagtgcattccgagtgtagcctaccttgatggattcgaacttagattgtagtgcctgatatccacgatggccaataatgcagctggcacggaaggcaatgacttggatagttttattgggcagactcattattttgttactctgagacgaagtaattgattagggatactttggtagctaaccaactcagctgattctccttagtcattgtttcccaaaattgtggaatatagaaactggttatcaggtttccatcttcttttcttgcctctaggattctatgtcttaaatagttatccatggggcgcaaggttctgacactgtagactattctcatctggggactccagggttatagattagcagtccagtcataactaaccgatggcttagttgaattagtctctaagctggctgccatggttagcaggtctggagtcaaatatttatgctcctcgtctacttctaccggcacggaatcaaagtccgttaccttagcagtgaagtaggctatcttatcctccagggtattccctttaatttctgcccttgcacaagccttttcaattagatcctctttgccgaaacaagagaattcttccttagcccgtgttagagcggtgtagattaattcccggctgagcatagatgagtggtcataatgggtgattagaaatacttttctccattctgatccttgagacttatgaactgtcaggcaataggcaaattggaatttctcctttgcgaattctccggcagacttcatttcatgccacatatccctaggaattccatctgggaaattatctacctgatcttcccacgctacgaagacggaatgactagctgcccgcttagtcattgattcatcgtcttcatcctcattagcagccttgatatcccctagatcaaagttagtataatccacatcctctagattaacttcctcagtcttcccgcctactagaggagttccgccacgggtataagcgcctggagccttagttacagtcccgacatacttagggttttcctcgatagccattattcgccctagtcttttatccactaggactaaatccccaacggctagataccattcgtgcattgcggctctaatatgatagacaagagcattcctagcctgtcctaagaatgtagctatgcgctcattcattgcccaaacgccgcaacctttcttattccaggctgataagatgatatcctgttcggggtcatactgtccggcttcgaagagtttttgcataactccccctagagccattccctgatgatccattcctaccttaacctttgctcgccctgttattaggttaacccggccacaaggacttgtttggaaaggcagtccctttagaactcggtgagcattagcaataattggattatctaaagcttgtcgatagacttctgttagttcgataacagggagtttactaagggcataggccaggattgggttaccgaaaacaggttgtagctggttaatatcccctaagtagataatctgaactccgggattcagggcagcatacaggttcatccatagatcaaccccgaccatcgaggcctcttcaataatcaggtgagtaattcccatccgattacaggcattgcgcataggcctgaaaatccttacctcataatcaatcccttcgtcattttccctagtttcaattaccggctcgtattccaatagactatgaatagtcatgcaatgctctacatacttcatagttgccgggttctttttaagagccttctgaatatttcttaccgcaaccttagtaaaggctacgattgcaatagaatccttttccccaatgtatttgaagttatgggtactgaaagcgccttgctcttctaatgcctgaactactgcggcctgagcggtagtcttaccagtcccggctgctccagtcagagcaaagcactgtccttccctggcataagtaactgccttagtctgcttatcattcaagactatatccccgaatctaattagttcagggttagagccaatctctagcgtgggcttggctgatgaagccttgattgccgagcgattagcttcgattgaggcttgtctagctgctttcatcctatctaagaaggatagagtagccttggcctccgataggctagaatccggcgcctggcaagcttccccatcctctagtttagccttaaagacttcatccttttccttggggcttaatccggccaattctgagactggaatggctacggcctgttctgctaaggatgctttcttttccaacatcttttgcaggaaacttagttcagacttaggttcagacttaggctcttcggccttgactgatttagccttgattaaatctttgaaattaattgccattatgattccctcttttaggcgagactacagcatagcgctcaccattctttaattcttgcatgctgataacacaatctatcttgtccagggttttagcctgattcctgaattctttagttcccactaccagccattcttgcccttgccagtctagggaaacttgatctttctcaatcggggctgagattagaaagctacgcttgagtaggaatttatagggccagggtttaaaggagattagaagtttaatttccggctcaactgaattagccatgattccatactccgggactgcaaagatttttgatttacttggaagcattctctttctcctttttcagcctagccatcttttccaggaaagtctctttagccggcttgggctggtctaattggatttgctggggcgctggcgcagagtcaaaggagtcaaaggctgaatcaaaatagagtcccaaggcttctacctttttcctggcctctagaacttcttcccggaaagaattgaattcttccagttggctaggggtagtcgcatatttgcctatgccagccaggaagctaccaattagggaatgtgactgatgagtagccagagtcttattaaaggatttagccttagctactacggcagatggcaaccattctgctaggccactaaaggagtctgctaggttagaatctaggcgctttgcctggcgctcagaactaacaatggttattggccggtaatcttcctcatcctctgccttaatccatccattttcttcggcattctcagtgaaataggttagccggaagattgactgaacataagaatcccaatcctcagtagttaggccagcttccttaaccttgaggattccgaagttagttaactccttatagattctagttttgatgaacttgagcgctttaattagttgatcctgggtccaatccttttcaatctccagtctggccagatagggagatttaccatctaggtccagtttattaattctggctagggagattaaaagggcaccggacaggagttcagatgaaaggctagtcagataccgccagttaattccagtcaaaggaccagtcattagctcaggcaaagtatctactaggggatgacggacaggcaaatagcatccgttgggaagcgggggaagattagaggcgacccgaaggccggaaatagggcagattaatgctgcggactctgaataagacttaacttcacgcttagccagaatccggcctttctctttcagagccatcaattgagtagccagggactggccgggctgagattgaggcttagagtaggaggtagtaatcagcattgcggttactccagatatagagttaataattaatctccctggaatagtccctgatagattccatctattgccttggctaggcctgatagtctgggtctatagggtagctattccagggaagttaattatgccgcacggattgccaaattgcaactagaggggtttaccagtccatatcggctatctgagattgggttaagggactgcctatagttagaccggaaccagtcttagaggctagccatttatttggatcatcgaatccttccctagttaggaaaatctccaggtattctagataagagtccaggctagccagggcattggccctagatagagctttagccggatcaatagtccctccagcttctaacaggcgattaattaggtccaactgactagcctttccttcgggagaatagagactagccttaattgatttgagggtggccagatgggattgcgtgagagtaggatttgaagcccgccattgcggggaaccgacagttctaactttagcgtgggccaggaaattggccagggtccaatcagactgaataggtagaactccctggagatagactaggctaatactggtagtaaatagggggaattgcttagttaaaaaggttcctcccttcttagctttaacctttggaaaggggttaggttgagctaggtcagaggatggaacttcggcttctaaatcagccagggttaggactaattccttttcagtcccaaggctagagtcagtcccaggattaggattaggctgggggttaggattagccgaaggctggagtaaagatttaaggaaggaagaattagccattggaagctccataggttggtttttgggtcggccatggtttgccgaggtagggggtccattgtagggccaaggttaggtcaaggtaaatgccgaggttcagtgaataaaggccaaggtagatcaaagttggtcaaggtagggaagggggtaggggtaggcttagaataattccatcccccaggttaagactgctatccccctggaaaaggagtctatcctatgtatatcaggctatagtggtcatattggtagggggttaaaaaattctttattattagggggtatataggggaatagggaatagggatttataagggataataattacagggtagtggactattataaggaggggggggccacccctaaacctacctcggcctactttgagattgtttcagaaagtttgaaaaaacattgaaaaaaccttgggccaaaaccttgggttaccttgactcccgattgcacgtaaccacggccaattttacgaataattcaccagggactaggcctggacaaataaaaggcaataaaaaaccccctggcctttcgactagggggcttagtgctaggtctagacttaccagtccagctctgccggatcttgctcgcagtattcagcgatcttctggaggaaaccggcttgccattcggacaattgctcggcattaaccagtgcttcgccgaattcgtttacccagcccaaaacagcattccgcacattctcaggctgcgccagcaaaccttccggctgattgaagaaggagatagccagcttcttgacgccttcggatttcggcaggttggaaacgaattcgctccaggctgcgataagagcgcggcgctcagcaaacacgacactagcttgacgctcagaaggagtaataacctctacgaaattctccggcatcttgcagccagggcgcagagtagcagttttagtctggagcttattacgagcatcagccttgcaggtagagactacagaacgatacaggaaggcttctgccagtccctcgtactgatacagtccatcctcagtcaggtcaggagtaccgtcagccttgagcttcggaataacagccagaccgaattcttccagggaaggaatgtaggacgaccattcgcctaccttgacgcggcctttgccttctacttgctggctaacttcgttggtaacgatcagaccagggaacttaattacttgagcttcggacattttctgaatcctcggaattgattggatggtcaatccgtccaccttagtggcggtcggtttgggcactataacgaagtgacccagcataggcaaccaatttttagattattctaactgattgcctatacttgcttacctcaattagcctgactgagcctggagtcaaaggaccaaggctgacagattatctctaccttatccttgcctttaatctcttcaattaggctagtcctggccagggaacaatcctcataagatagcccctcatcaaggatgaacttattaccctgattaggaccagccaggacaaccaaaaccaatgcaaaggtatacataattaaactcctaataagcctggactagaatccgcccttgagcatccattcataggttcgaatggcattagaatagaaggagtgagctttattagcctcatccttagcgcccatatcccgctgagcgacatagtgattgtacatggctgctatgtactccaggcaatccctcctcgaccggaaataattcttagtcaattccagggggcgctccagggaattaatagggaaatagactagagtgactggcctagcctcaaccagggcaagctgagtttgatagtcattaaatgcccgaacagccatcagattattagtagccattagattaaactccattgaagcggatagacttagggaagcgactaattagggacgacagcttagccttgaactggctagccccacgattgaattcttctaacagcgaccgattaatccaatcgaaataagccttatgccaggcgctagcatccgcgcgctcgcaccgaacttggatagccagtttccgaatatccaatacattcataatttccatctacctaactcctaactagatcaaaattaattaactacaccggtcattctagtctgacctagttagaagtcaagcctaattctaattaatttcatcctaatcctggctaaccttggctaatcctggccgagcctggactaagggaatgataattagttgcattcatagggggctacggacctttttgggtccggggggagggggggggtgtatcatataccacccaacaaaaatttctaaacttttccaaattcaagctccaggttctaattccaagtcctaattattagctccagcacccctggccccggcctccttctttatatatactatccctaacccaccctcggcccctgcggccccacctggagccagaccccatggacaaaaaagaaagaatcgcccgtctgctggcgacaggattaaaggccgcccaagtagcagacctagttgccgtttccccctcttatatcagccagcttctaacctcagattcagacttcagggattatgttacttaccttagaacagaatcagcagaagaaactggacaaccaactgaggccgaagccctagaattaaagtatgaggcagcagaacatactgctattaaagccctactggaacgtctaccgatgatggaggataagaatctacttaccgcagttcaggtcctatccaacaggcgccagcaagaggctaaggctaagctcctggcaaaaggaataggctacggaggatcagcaactcaggtagtagtcgatgggaagtctgtaaaagttacccatctgcaaattccagcggtctgtgctccagacttcacttattctgatacgaaggaaattgtcgcaattggcgatagatcaactaatccaatgcccacaccccagttaaaaggattgttagagtcctacttgggtaaggcagatccctcaggggtacctaattatgactcattcgactaatctggctcaggtcaatcaatccaaaactgcggcgatggctaaggctgctagcatggctaaattgttggcttctagtcagcctaagcttccctttttcccattaaggatggcggcaaatgagcgatcctaatcaaccctctagttcaattcctgacctaactaaaggtcaggctaagaatctacagacccttgaggactattttaaggctaagtctgcctcctcaaagactcaagaagaattagtcagtcttgagaatgttagccacgagtcgatcagagaaagatgccgggtggatctcaacttctacgcaggattaattatcccgcgtgtgatgcgagttcctttcccggctttttattgccagttattcaccctccttactcagctcaatcctgatccctatgagcttatgcgctttgctctagggctcccgcgaggattcgttaagactggcttcctcaagattctaacttgctggttcattcattttggctacgcagaatttatcctgatcgtctgtgcttctgagcctaaggcagtagcttttatcacggacgtggataatatgctcagccagcctaacattgaggagatctttggtctctggtcagctaccaagtcagtagataatgctaagaagaaggtagggacaatcaatggcaaggttgtaattctactccctgccggtgcaggaacagcggttcggggaactaacgaggaccataagcggccagacctaatagtctgcgatgacgttcaaactcgtgagtgcgcattatctgaggtccagaatgctgccctgctggaatggttcacggctactctagttaagtgcattgataactatggatctaatcgaagaatcatctacctgggtaacatgtatcctggagactgtatcctgcaaatgctcaggaaaaaccctgagtggattagcctagttaccggtgcaatcctggaagatggagaatccttgtggccggaacttaagcctgtctctgtcctcatacgagaatatgtgcacgatgaggctttaggcctaggtcacatctggttcgcagaggttcagaatgatcctctagactcaatcttcaagctactggataagcctatcccagatgttccatttgactgggagaatatggaggctgatgcagcctttattacagttgaccctgctggcttcaggaaaaagtctgaccataacgtagcaactttgcataagctttatgatgggaatcctgtagcagtccagatgcagggtggaatctggactcctaaagagactgtatataatgtcattcgcatggcactagacaatgcagtctgcataattggaatcgagtcaacaggctaccagcaatcactctgttactggatgaatgaattccttcaggcagccggaataacctggatcaatgtagttgaactgaaaactaagaataagaccaagttaaatcgtattcaggactatatcaaagaggtcttaggaggcgatagcttcatgtctcctaaagttaggtcagtcttcagcttctacgctggactgtataagataggtaagacggataaccgggatgactacctagactctccggcttatcaaaagcagattctaactgactatgggaatctcttagtcggggttaagaatgttcagcaatctctagaccagttgccaccaattgtggacgtaggaataggagaaatggaaaatggctattagccccagcgaacccaatattaatagctttgtctatacccagagggtagatgagctattgaaggcccatcttaaaaagatcctggacttttccaagactaataaggccaactacattcagaagatggacctgattgataaggcctatgcccggtatatcactgctcaggagaacaatgagctattgggctataatcagaatattgctgccaaggttcgttgccaggtagtcaataaagctacggttaacccaattgtaattagtcaggtccagtctatgactgcctacttgactgaggtctttgcttcaggctaccctattctccctgtagtctccactccggataaaaaagagcaggctgaagccctggaagggattatccaggatcacatgactatgaccagttctatcccagaattgatcctctgtctccaggatgcagctaaatataatctggttggctgggaaactgagtggtcccatatcgagacctatgatcctcagaaggagataactgatcttgaaccagggaagactaccctacggcgcaattacaggcatgtgaataagattcgacgtctaaatctgcggaatgtccactgggatcctattcctgatattcccaatgtggccactgagggagcattcctgggagaaactactctccttaatcgaattcagcttaagaaatacctgaactatctgactaatgagaagaagctgacctataagagagtagtcaatgaagcccttaagtcttctttccaaggatcggactggactgataacccgcaaattagccccgtctaccaagaaatggagatggcctcagatatcaactgggatagatttggtgggtttgagaccgagacttcgtcaactaatcgtcgggtaccagttaatgagcaaggagtctactgcaagcacactatgtatctgaggattattccctcagactttgagatgaatgtccctaatcgcaaccaggttcagatctggaaagcagtgatgattaacagggatgcaattatctccttcgagccttatatcggggcttatggttcctttggaatgggattagcttttgccctggaagatggcatggggttacagactcaaggctacggagaaatggctgctcctcttcagtctgctactactgaactctggaatgcctatatccagggagccaggcgagcagtaatggatcgagccctgtataatccgagcatgatccgagctaacgatattaacagtccgattccccagattaagattccagtcgtcccccaatccctagtcaatggaactatggatcaggcttataggcagattccctttgattctagagggatggaaactgtaatgcagaatgccctaatgctaacggactggcagcgggaactcagtggaatgaactctgctacacgcggacagttccagaaagggaataagactagggctgagttcgatactatcatgggcaatgctgagaatcggatgcgtctgcctgccctgatcctagaacataggatgttcactaagattaaagagcagcttaagcttaatctcctcatgtacggagaagatactgaggtaattagtcctcgaactggcaaaggagttcgggttgatattaaagagcttcaggatcttggccttaagtttgagctaggggatggtcttactcctgctagcaaattagccagtagtgatttcctgactgccttgcttcagatgattatgtcctcggagactactctacaggcattcggaactcaggtacctggaatgattgctcatctggctcagctgggtggagtacgaggattcgagaaatatgctgatgctgctctgcctcagtggcagattacttatggtatgcagcagcaacttcagcaaatgctcttgcaattacaacagcagtctgcaatgcagctacaggctcgacaaggagaattgagtaatgatcagtctcaaccatctcaataagaagcgtctaattggattccatggtccttatggatcaggaaaagataccttgagtacccgattagctggaataattaatgccacggttgatagagttgcagcccctctgtatcagatggcagcggctattgatcctaccttccggccagacatgcctcactcggctaagaatggctatgttcttgggaattcagccctggggactaggcgagccttcctagagaaagcagggacagactttgcccgagatatgattaatccggacttctggattatcctccaggacatgcgctggaaagcttcgatgagaagcatgatcattgctgatatccggcccaaaaatgagcaagactggctattgcgcaatggtggaattctgttccatcttaagcctgggtgggacaatcagactaatgaaaccggccaccggattagttctcctttgagcattcagaatcctgaacaggagtttgagattcctctggtctggaatgatatccagggcgcgatgaggattatccaggatcgattaggattgtcctagggcctggcggagattcggaagaattaacgaagtgtgcctttatgcggggtagcagactgattagcgttaagcggcaagcctcttccctgcctgcagggggaggctgtggcgtagcctaatcattctgcgcaggggtccccgtgtataaggcaattctgatctaatcggagtaaatatggaaaatttcaacgtatttaagggtgccagtgttcctcttactatctcagagcagctagagttcgagagacttaaatataatgctgctattgagatggagaaatctcctaatattcaactgttgattaagcattactatgagcaaactgctgctcaattacttaatccagtcaccgaggtatctgcgcaagctaatgactatttacttagagcggcgcagaaaacagctagcctggatgtataccgttgtctgtataatctggctattagttctagggatctcctagaatctgttaagcaactccaagaagccaagcaggctgaggatgagcttactcaacttaatcttctcaatcaagagggataaacatcatgagctttagtcttggcagtttcttcggttatggtcaatcctctgctccggctcccgctaacaatcagcaaggtgctcaaggtcagggtggccagcagagtcctcaacagcaacagcagcaacaacaggctcagaataatccggttccggctactggaagtgaacaaggaatgggcgctggtcagaagtctgacaagccatcggggcttgacttgcttgggcaactgtttcagaatgacagccagcaggccgatggccaagctcctgccttttcaattccccctgaaaaactgaccgaggctgcttctaaaatggacttcggtcagtccatccctcaagaagctttgcaaagattgcaaagtggcgacatgagtgctcttccggatatcttgaatagttttggacgccaagtctatcaagtagccatgcagcataatatggccgtcactggacaatatttgaattctcgttttgatcacgagaatggtaagcttcgcggtagtctccgccaggaagttatcggaagtcaactcaacgtttctgatcttcctggtccagctcaggcaatgttccgcaatattgctcagcaggctgccagtaaattccccgacaagactgctcaagagatcgaaagctatacctgggaaattttccaaggtatctctaatgctttcaaccgtgatgctcagcgagcagagcagtcgaagcctcgtccaatcgattatgatgaatacttctttaagtaatcaggagaatacttatgagcgtttacgctggtatttttaataccactctgaaccctcaagaactcaacatgaagtcctttgctgggactattcttcgtcgagttcctaatggttcggcaccgctgctggctatgacttcggtagtcggcagcactactgctaaagcttctactcatggatacttctccaagaccatggtatttgcttcggcggtagtaactgcagaagccgcagctgctgatactgtcctcaccgtagaaaactcggatggtcttaccaaaggcatgatcttctataacgaggctaccggcgagaacatgcgcctggaattggtcaacggcctcaatcttactgtcaagcgtcagactgggcgtatcgcggctgctatcatcgctgcgaatactaagctgattgttatcggtacagcgttcgaagaaggctctcagcgtcctactgctcgcagcattcagcctgtttacgtgccgaactttacgcagatcttccgtaatgcttgggcgctgactgatactgcgcgagctagttatgctgaagcaggctatagcaacattaccgagtctcgccgagattgcatggacttccatgctactgagcaggaaactgctatcttcttcggccaggctttcatgggcacttataatggccagccgctgcatactactcaagggattgttgacgcggttcgtcagtatgctccggataacgttaacgctatgccgaatcccacggcagtgacttatgatgatgtcgtcgatgctactatcgatgccttcaaatggtccgttaacgtcggtgataatacccaacgggttatgttctgcgatactgtaggaatgcggactatgcaggatattggtcggttcttcggagaagttaccgttactcagcgggaaacctcctacgggatggtcttcactgagtggaaattcttcaagggtcgtctgattcttaaagaacacccgctgttctcggccatcggtatttctcctggcttcgcagtagtagtcgatgttccggctgttaagctcgcctacatggatggccgtaacgcgaaagtagaaaactatggccagggcggcggtgagaacaagtctggtgctaccgattattcttacggccacggcgtggatgctcagggtggttctcttacttctgagtgggctttggaactgcttaacccgcaaggctgcgcagttattactggcctccagaaagctaaagagcgcgtatatctgaccgcccccgcgccgtaattcttttatcctccagtgaggatggtcaacctggctcatcctagtggtgggccaggattttttatatgtgactaggagaaaagagatgactactcccccgaatgccggaaattttctagccaatctgaagtctaaggctgccgaagaaggtgtcagtactgagtctagtactaaggttgaaaacaatcagcgagggttggaggagattcaaggagcacttaatgcccttaatcctcaaggattaactcctgcagcttctatcggaatgattggaagtagtctggcctctcagattatcgagaagcctgtacatgattccatgtccctgccaggttactactctgttaacgtctccaaggtgcgagtaaatggagcagtagttaaagggaagatgaacaatggccgattctattggccgctaaattctgctgaggacgtagtagcagttctggaatcctatgtgaaatctgggatggttatcaaggtttcttcggaggactaataatggccgcgtacgctggtatgattgcagagagtgtgatctccttaaccgggcgtacggacctgaaggtcactcaggctatttggtcgatgctgaatatggttgttcgggagatccaggctaaaagggattggcctcaggatctattcgaggctgttcttccaccatatccagacttccaaactactcgcgaaatccagttacctagattggatatgtgggattggtataagcctgagtggccagatttccgtcctcctcttatgggttctaccatcaggaagattgaatatctaatagtaggggatcaacctgcattagagcagattcgggcttctgacgcgctgataggaacttgccagcgccaaggagtctattacaagaaagcccagaattttcttgtaattaatgctttccagccctgggatactttacgtttagggatatacgtaatgcctgggctgtttactgctcaaaacaatacttatgatgagtattggctctttgaagaggcgtatgaagttgtcttcgctggctgtgcttatgcagcatataaggctagtggagatgattcttctacgcaaatctggtggtctgattaccagcaaaagctagccgcttggattgctagcagggtggatagcgatatggtgtaaggagagccaagatgggactagagccgattctaggagtccctctcagcgtaatagtcctgtttcttctggcagctggggcaagaatatttattgcttcggaacctctgacttataagggaatcctaggccaaattttctacacgttctttgtaggatttgtggcctacccttacttagccaacgaagtagaagccaagggtcttataactctaatgcttgcaataggctgtttcgcagcaaaggatattctagaaatagttctagtattattcaagcaagtgaaaaatgaccccctaggcattgtgagggaattcttgaactggaggcgagcaagcaaacgaggcgatgacgaccgatgaactatatagtttggttatacgcggtcataattctgttaggtatctgtatctttctatataccctttggggctacgctgagtgtgagagtacaaggggtcatagagcatacgttcttcctatttttacctcgataggctgggtaatggtgggatttgacggagttactgctcaaattagagagacgcatggtaggccagatgggatagcttttttactcctgactgcttctactctgatatccctagcattgtttattcagcattacaggagatgtcattgtgaaactcagcgaaaaacgagcactgttcacccagctgcttgcccagttaattctttgggcaggaactcaggatcgagtgtcagtagccttggatcaagtgaaaaggacacaggctgaagctgatgccaatgctaagtctggagcaggcattaggaactctctccatttgctgggattagccggtgatcttatcctctacaaggatggtaaatacatggataagagcgaggattataagttcctgggagattactggaagagtctccatcctctttgtcggtggggcggagattttaaaagccgtcctgatggtaatcatttctccttggaacacgaaggagtgcaataaatgaaagcgctagtctacaagattgccattggactggctcttgggctagcgcttttttcgttgtggtcgtactattctctgcaattgactaagcaggagttggctacagctaaagaagcgttagcggataaatccaaggaagtcgaatttttaaacaccagtctacagttacgggataaagtagctttgcagactgctgaacgagaaggagctattaatgctcaacttcagcgcatctatgcgactgtatctaaatataagtcgcaaactaattctgcatccgatcagtgtcttgggcttgttcctagtcctgagttccttgagtgggtgcgcagagcagaagccgattccaaggataagtccggcgctgctagttccaataaataaacctcctgagccagtaacctttcaggattatgttatctaccatagggcggctagcaagttactagatatgtgtaatggccgccttgagagcattggagtagaaaatggcaacttcagttccaaataacgcaatgattctggcttctgaagcaggaagatatattcctgtagatgtggtcagacccaagtatcagaagctattaaatccaggagcagaattgacggtttttgaactaccagaagaagtcaatttctgcttagtaattccgagtgtagatatgcttttggttgcggattctcagaatgttataaatcctggaggctggacaaattttgggtatgctatgaaagcagaccgagaatataaatttatacttccgaaaaagataatgttgcagggatcaggttcttgccaatttaatatttgtgaaaaatggtcaactctgcaacaagaaggtaaatatactacttcttaaggagacagtcatggcagattctagaggtatgtatttagataccagccggtctatgctggttattgatcctgctaagatgcccaataacttgggtaaggctacggctgaagacacggcggattcttctttccctgtcattgcgtatcatggctggaatattcttcctactccgatgggatataagtctgcttttggacttatgccttatcttagagctgatcctcagccggacgatgggaatccgctaaagcaacttcgtaagcaggatctatttacttatcagaccattaacttctataacctgggagttatgttgactgagggtggattctggatgtacagttctattgggaactataagtctggaattgacctggatctagaagagtgggttcagatttttcctgttcctactgctcaggataccctgtacttgtggactcggtgtgttattgataataccatctacatttatcaccagggagatcccgagatttatgtgctggcggactatggaaagattcaacaatggaaggctaagcctaataccactctagtagtagaatctgttgactggcagtttggcataatcaaatttattcccaccttcttgaatatggaagggcaagtaggactcttcaaggctgataaccgtcttggaatgtgggatactgataatgcgatcgcctggtcttcggcagtagataaacaggactttaagcctgacgctactacttttgctggggtgactaaattcgcctcagtagatggccagatttcgatgattcttcagcatgggcctgggttcattatctacgccagtagaagtatctcgatctgcacgccaatcactggtactccagaaaaattctcaggtagggcaattctgaacaaaactggtgttccttattacttccaggctactatgggacagccggatacagtccatttctcctggactaactctggcctactgagaattactaatggtaatcctgagttcatagaaccagatgttagtaacttcttaatgaataacttccaggttattcgtcctatggttatcaacggtagccatctgttcatcagcgtagctaataattcccgagactcggctaatagccgctacgctgtactggtttatgatggtaagggaaagcctgggtactttaacccaccaaggtatgagtatcctgatcaagcaattgactggcttcatgattttatctggggacagttaccagagtaccaggagcagttacctgagtacgagactattccaccggacaatgatcctccacctctggctgagcagcgtcccttgatcccatgctatgaggggtatacttttattccccctagtggatttgaaactatcgattggaatactggaactggaaccactatcagtgtacccagtattccatccttcagattccctggaggagtttacaatatgatagatcctcaaatccatgggctcaatcaggatacagctttgtggcgatatgaagctggtccaattgttagtcctccaggtgctcacttcattgacaaagcaggagaagaattcgcagaaatctggactcagatggtaacagacttgaatgctgttagggataaactaggagatgttcttagggataccaataagtctcttaccaactcaggagaaatggactttgtaggggatcgggaaacctgtcgggctaagcctgtccctgatattcctcctgtccttcctctggaagaggatcctaatactatctggattccagaagctaaacggactattagcaacctcctgatcgatatcaaaatggagattgagtctaatggttgcgatgtaaaagtaattgcaactgtagctgattataccgttgagactggttggagggtcatagatgagggttggcaggactgcaatattgatgaccctgataactataaatggggttatgtaactgccccaggtgttccgcctgatactgcggccatcggtaaaagggagaaccttgttaagaaggttgaagggtccgaagtagaagtaactgtattccagtgcaaatgctctggatttggatacttccctgccggaggatttagcttcaggaaaactcattctcggagtatctttaagccttgttctccaactccgcaggtaactgttattaccatgccgcctaatactattccagactttccggctgagaaagatcttctttatcctccctatgagaattctggtggaggatttggatatcctaatcagttccctggaaatgggaaaggttggatacgtgagccagggagttctgattttggattcccagatactttcccaacttgggctaatataggtaaaggtttccaggttccgtactaccctgtctatgataaggcttatgtgctcgatcttaggcttggtaagtatggagtatactctgatcctcatgttttgatctgggaagctctgccttctaaccgtgctcagaaaattgaacaaggtaatactcaagcaggggattatcagtatagagtgctgtcggagattggggctggggcagtttgcggaattcccttagaatgggatggagaacagaccgggtatagagatttggcccggttcaataatctgcctattctactggctagtttcaacgctctgtcgctagttagactaggcaaaattggatatcgtagagcaggattcactgagctacatggaattagtatcgacgtaggatctacagtattcaatcagaatgatacttgccatgttaacatttatggagcaactgataatatcaagtttaatccttaccaatctccggatgatggtccgttcccaataggtgatcagctatggaaagattatagctattggaatcctgaggatagggatatgggagcatatgtccatactaatatgtttggatttaagctacagggatatccttctgctacggcggaaattcctttcctcagaacagcaagatggtttatagtagaacttcgcgggcagttcgatatttccagcatagttctatacgggaagccggtcggaagacttcgcttcgtatctgatccgtttactccaacgtaaggagataataatggctattagtcgcaatactcctccgggaggtcaaggagttactcagaccaccaataatagtggcgggacaactactacgactgtgggaccctcttcgtcgtcttctgtaggagggtcgtctactactcagtctggacgaactagctctgcctctagtcagactactagcggatccaggactcagacggggacgcagactacagtaaccaataatatggaccctgctagttttgctgcgctgcaacagcttatccagcagctagctagtggtggaaccgccgaacagcgtcaacggcgtgagcagattcaagaggaactaaaggctaacagtctgcgtcagcagcagtattcaaaagaagccgcccaagaagattctgcagcagctgttaatgctcagatgactcaggccttagaacagcttatccctactatttctgcggggatagatgctgctggtacctctggatcagcaatggctgctctgctgagtcaggatgctgctgagcgggcctctagacaggctgctcaactaggactagaagcagctatttcttatgggcagatagctaaccaggcttctggcaataatgtcagtctcctgcagattgaagatcctgttatgaagaatcttctggaggctctcaatattgccaaaggggcgcagacttcatccactactaagactagcaatactgagcggtggaacgaagtcatcaatcagtctgggatcagcaatactagctctacgtctaataccagtaattggcagaataacttccagtctggtaatacgactacgcagacgactggtccttcgtcgtcaactacaacgacccgtcctaattccactgttaataatatgggtaaccgaggtggattaactactccgtctagttactctcaaggtactcgttaataggagatttataatggcacggtttatcgattcccaaggtaattgggtagataccgaggcccctcaggaactggagagcttttatagttctctggttccttctatggacctcaagaagtttcctaccctcgatcagcctcaagttcaagcggtagttcaggaaaaggctaatcagcagaagaggattgatacttttactgaatcgatggctcctctggcccagactacttttggtgaggatgcactaaaggggcttctgtctgattctacggcagacatggaacaacgggctggggctgcgcaggctctgtatcctggaacaaaagtaacagtcggtaagcacggggagctatcctttactgccaagagcgtggatatgggtttcaactatcctaactctgggacagcttaccagaatccaactcaacaagtagcagataaatctgtccagcagtctgatgccttgaagaactttgatgaccgtttcagggcaattcaaggaatggctgatcctactgacattatgaacgcctatgctgctcttcaagcagatgctaatacttatgtcactgggaaaactgctgcccttgagcaaagaattggaaaggctttaggctatgaccagttgcagcaacagttagctactgatcgacagctagaccagaattactataaccagtattatggaggccagtacctggggccgagtcaggagagtctacagaacatctcagctttttcgactgttaagagccagcgagatcagcaggtcagcgaagtaatgagtcgagaccctgatatcattgccctgaagtctaagatggctatcctggataacctcattaaacagcgagtatctgagactactcctaccactggagcaggccttgtaccagaggaagatgttgataagattcttatggtccagggagtagatcccaataaggctaaggagaatgagcgattcctgattaagtcgcagattgctaagaatgatgcagtgactatggctaagcttacaattgcttcttctggtcctgttcagaatttgaccgcggcagctatgtctcaggggcctcaggctcaatgggctttgaatgctgctaaggctcagtttgatactcctgatttgcctaatcagcttattaatgagttcaggcagtttgattctaagtatctaccgcagattcctaaggatcagcaaagtctgtataagctgagccaggttgaccaggctggatccaaagctcaggtagaagccaggaagatggagattgctcagaataagatgcagtttatcgttagtaaccaggctaatgctaggcaagcagcttttgggcagtcagttattaactgggctgttcctcaagatcagactattgctcctgaggttaaggctaccttagagattgtccagaggcagcgccagcaggaaaactctaccgctcccattactattgatgacctaatcagtagaatggattgggataacgatcctagtggagctaagagggatgccatgattgcgtatattaatagccaggcagctacggtgtctgatcaaaaggtatttggtcctgttcctgtcttcagcgatcctcagatgactaggggatttgtagacggaattatagtcagccagcgcttccgtaatcttggaattagaggtggatcagccggctactacggtggtcctgcccaggatgcaatgttaacttcccagggttatcgtagccagattcaataaggataaggtgaactaaaatgattcaattgggcgatctgaataacctctcgctagcatctcagtatgactggcagactcagaacgccgtagataaggccgcagggattgcggtcgctacggttgttgatattggaaccagtatgtggaattctcttgtgccggagtctactggctgggaagtatccacccaatccctcctgcaaagcatgggcgcaaaaggagcattgcaggcttataatgagaacactgatactgttcaagctctgagctttattggtggaatgtttattcctgggggtgcggccttaaaattagccaagggaattcgggctggtcttaaggctactaatttcctttcctctgctcgccacatggaagatttggctaagtatgagaacttgattgccactgctcagactgggacagctgagtataagaagcttcgcaatggaatgtatctgcgtgggcaagctaataacctgatggactcagtggctgttgagcttagcctgatgggagcctttaatgctcacccatacatggaagactatatggagaatcccattaagaattttgggattggtctagctctgggaggaggcattggaggtggattagcagccattggtagtaggattgaactcaaaggaattcaagggttagtagagtctaaggctctggagcaagttagggagactgctaatctgttcgatagtgcctttagtgacacttctactaccctggctaacctcaagtattctgctcagaatctggaacagatgactcagcttcccaattatactccgttagctaaggagatggctgggaatatggctttgtctattcgtggaagaatgggtgagcttgctgagaagaaggctgcggctgatatcaagaatctgccagctggagaagagaagtctgctattctagataggcttactgatctgcggttcaatggagttgatagctttggattcttcaagcctcaggacatagggcttaagccaactaatccaatcactactcagcctgctcctagctttgttaagacctctattgtggatgggaatccagttaaagagttcagaagcgagagtttctattctccagatctggactcttttatgaccagggctcaggctcaacaggttgcctcggctgctgatcttggatattctccagcagatattaccaggaaagcaggaaggctgacctggaagcgtcttcagaataattttgctgagcttcagcttggtgagcgtactgcggatgtagaagttaactggctggcaaacctgaagtatttcgatagtctggatactaagcggctcttggagactgagctggttaaaggagatttcccggctattcaaggctggctccgggcaactgagaagcggcggaatgaagcttattccaagttccagaatgctatggcagaagggaatcctgacgccaataagttcctggaagagtttactaggattgaacaggctaaggttaagctgttctctggtgatagggttcaactggtagaagtccaggagataggaactagtcttcctgtcacaatggatggtctgaactatgttaagcctactcacatccaggacattagtaaagaaattgatactaggactatccagcctctgttgaatgagtctactgaattcagtgtggccaggaaactttcagcagatatggatcgttatatccttcataaggctggagctaagagcctagaagatgtacctgcccgagcccaagagaaatttattagggaatgggctggaattaacagggaagcaatgcaatcctttgtatctcctaatgctggattgaatccctctactgtagctattctccttaaatggattggtggtaagttccaggataaagaagccttccgtaatgcaatggcatcagcacgtactcttcgtaatggccaggattctactactcctttccatgatgaattggctaatatgctgaatagcccgcttgtaaaagctcaacaggaagcacttcgccgtcatgcggatcaggctggtaacgtatacctatatcgtggccttaagtctgatcctgttggagatactccggtatctagttatactttccacgagcaagtagctagatccttccaggaagggatggctgatccttctatcttccgagtgcacgtagatgatgttgtaggctacttgtacggatatgagcgtgaatggctggtaggagcttcgaccagggatagactggatgctctgcctacttcaactggagcttcttctaagcctcggactaataggggtgcccctaagtttgagaccttgactatggcccagatgtataagcagtatctggctgataagtctgaagcaatccacaacgttgttaatgagggagcattagcccaagaagttattgctctccagtacaacgttcctttggatatggttccagtcctaggcagtaataagtatgccttcactgagctggctcagagtaaaggatattctgaggctatttccaagctggataggtggaaggatgctgaggagattcctcaggctttggctccgactcgtaggatcatgagtcttaaggctagagaagatcagcatatgggccggacaggtgaactattggatcttcagcgacaagctttggtctctaaagctgccctgtccactgaagttaagatggccctgaataatggggatactgcccatgccaacctgatgcaggctaggctgaatgtggttgattctacctttgctgacattaataagctatgggtagagaattccattcgggctgagaaatctgaactggctaatagtctcctagataatatcattgattcggctgagtataaggctctgagggaagggcttaaccagttcgttaatggtaaaggaggtaatccgttctaccaatcggctgattttgtaaccagtcagatgggagatgtaggtagactggtaactagcattggggagcgcgtgactcattatgctaacgaggctgcaactaagtacctcactccggtagcaactgagtttaggaaactgcacactgacttagcagcacgggctgaatttgctaacctggataatcttcgtcaagggactccaggctatgtgaggtatgatgttgaaagtcgaatgctggttactgggaccctagatcctaagactggacagatgattaatgtcacccctctcatggataagcctgtagtgagtgacatagttcataatctgcttgaagcttctcagaaagcaggtgatgaaatctataatactcagtctgttattaataggctttctggtagggataaaccggccagtgtcggattatggattcctccagctagtctgaagaataaggagtatgcctatattgataatctcgatactcggcaacgaaagctaattatcggtaacaactccaaggaactggaagaggctattagtctgtatactcctggtcctaatgagcgaattatcagaagatcagaggctcaacttgaaaatgaggctatgattggagatgacctggaacgagtctatgctgctgatataactaggcagaaacgaggaatgggtcctgctactcctgatctatcggctcaaaggctggatgagattattatgggctaccgggacagattccttgcccaagcctcaggcattactgagctatcttcttttgacctcatgaagaagttagactacgtgtctgaattcaatcgccgatctattggtaataacaacaaaactggatggaggaaaattgcagagaacttcgctactaaggatacggccagggatattaaggatctccttcttggtcaaaatcccgtttatcgtagtgaagtaatgcggaatgtgaacaacgtaacagactctgttatccagggtgtaatgcgaaccttccagaatgcttgggagattgctaagcctaccaagttcacttctaccaattacgataagtttgaagctgcccgtaaggctgcggggattgaagatccgtttgccgcctttacagaagctgctagacctctaatgtatgaacgagctaggcagcagggaatctctaatccgaataggatcatccaaattggtaacgagatttctactactctagctctgaaattcatggagcttgcgcagccgattaccaacatgctcagtctgcctatcctgatgacctctactatcagtagggcaattaaggcaggaggaattcagactggagttgatgcccttaatagcagtagcctctccattatgcttggaggggtaaggaggatgaacagtagtaatccgatagaccagcgaatctttaagatggctgaggcagaaggattgttcagtcctattatctccgaagtggatgcagttatgaagcttagtagattctcagctggcggtacagcagctagcatcgaaaaagctttggattccaagttcgttcagataatgggtaagccttctgagctatccgaaactctggtacgcaagactgcttttgctaccggaattgaaactgcccgtagactgtatgggaataaggcatcagataagcaagttctaatctttgccagggatttccttaagcagtcggtaggtaactatactaccagtcagcggcctatgcttttccaaggaagtgctggggcagctatgggattattccaaacctatatgctgacctatgctcaaaacctatacaggcatctggaattaaaggactataaaggattaggcaaagtaatgcttgctcaaggaggaatcttcggagcagggagccttcctggattccagcccattagtcatgcgattggagatcatttctcagatgataactatgacctgactactggaaccttcagagctttggatgatgacctggctagtattcttatctatggtcttccttctaaccttggcccagcattacatactcgtggtgatgttaaccctaggattccatctagctttgatactatggttgctccatccatgattgggcagcttatgaccagctttgtggatgtaggcaaggctgttctcaagcaggatggtaacgtaggacaggcattcttcgaggcactcagtactcagtctgttagccggccaatcgcgaggttgtctgagttggctagtgggtatagtgtgacaggagcagggaatcagattgcagctccggaggatgtctggacttggcaaggagtattggctagggttctatctactcgaccactgaaggaggctaaggtaagagaggctatccacctcaatacttattatggatccttggatagagagcaaaggcaggcagtcctggaaactatgaagactgctatcaggaataataacctgactcctgaactcatggatgatctggctctagaatatctgaggactggaactcctcaaggactccgtagtagcatcaaccaggcctttatggagaatgaagaaggtaaggtagctcagcttcgccagacctttaaagattctcctttggtatacttgctggacgacctggattaattttcaggcataataaagcccctctagttatcttgactagaggggcttctttttatcagaaggaatcaggttgggcaatagctctgattattgccatcatcccagtctgaatatctgtcttcccaattgccagccatcggccaggctcagtattagctatcctagtagtctcatccctattatggaagctggcattatactggcctctgagatggtcagatacatcctggatcagtttctcaaactggcttcctaattccttaacccggttcatcatatcaatctcttcctgagacaggtcccggtaacccttgattttcttatgctggttatccatcttagtctccactttggtctattgcggcattattagtttgatcaagaatagcaaagaattcctgctcttctttaatctgcctattccaccagtcctcgcccattacctccctgatcttcctgtctttgactagagctacggctgcctcatcttctgctatctcctcgttcatagcctggatactataacaggaggtgtaatgcgtggctttgaagataagaacctcttcaaatgtctcaagacccagtgcgaatcctgtagtggccaaactctctaccctggcctcagttcggaattcagagttgtacttattagctgcggccatagccaggaagcatagggcggattccagattattatcatcgattcgcccaagagcttcacctaccaattccaggtaaggtacttcagtccaagaccttggaatattatttcctcttgcctggcctttctttagctgagcttcaatcactagcttagtgaaggctggtaacttctgatccatatcaatcatggctgactccttccagtggtaacgtatgctgggccacgttagtacaatgtttggtactggataattgcaggcggctgcataggaatatccggggtcattaggcatcacctcctttaacccaatcctagcttaccttagttgacagactgcctattgggaagactgactaatttcagactgccgggcatcatcccgaatacttcctcataggctctgacgatcgctgcatccccgcctatgtccagttcagcctgaactaattctttaacaagtctcccgcctatccagaactccaggttattgagcatcctatcctttctcaatcccgtgaatttctgtttcctgcaatctgtcctagactgctcgcttactgccaccggcacatacatagtagatcctcccgttcaaaaagatcattgaccaattcttcggtaatagtcttaacccctgcttccattgcccagactctaagagcctgccagattccgagggtagcctgattaagttcctgagttctagtagccaggagtttaatataccccatcttgtaagcctcggctagagcatcagctttatttttcctggcatgttgagatagggcattgaatactgatccgccccatttcaggctttccatattaggcttagcctcccctagtatcttcacaaatctagggtaactcagcggatctccttcataggacttttgcttaggagccggagaattagctattttactgtaagtttctaggtgactcagttcatttttcacattccgattaactgcatcaaccgggtcaaaacgtaatgaggggtatcgtttctcaagctttttaatattagcctcgaatacttcactcagtgaccagttattattccgagcagtagtctctacccaggtcagtatgcctcttactaagttattagctttctcccaatcaatggccttaccatagaagatacggcgcttagccaaatctaggatatctcctgctagagggagtactgaacgactatcaatctccaaggcagtaatattcttggaggctagaacatccagaaggatcattgagtaccaggctatatctcctagttcctctagactgttatctagactccacccatattggaattcgatcgcctcagtatttaatcccatagcagcatggatgaatcgaacctcatcctccccaaatccaatgattgaaggaatggattcagtccttttaactagctgaatatactcttggtagttcataactatattcctattctatcccgttcttgcttggttagaacttctggaactagaatgtcttttgcccaggctggtaatgagcgctgaactacagtcattcctttaattccattgggaagttctacatatttgatcttaccagaattatatagatccattaggcaactatggaattcggcctccctattaaagtcagaaatgaatactctataaagatcccgcactgtcactggcaatccttgctgatccaagtattcaaccattgcatgttggctaatggatactttacttcttcctagatgccccaatgctgtaggcatctcatgctcagctacaaccagaactgtattagcggccaatacgtcttctacggatatctctgtttgaagtcttgcggctgcgtgtatcatagccagcttccagaggtgagtaattctgcgtccgctataatgagcaaaccgcgggtcttccaatggccgctggttctgatatatgtagttcatcactttgaaagcatcggatgtaattcttgcctgacctttaactgtctccttaattgctttaagcttggccccgatatccttaacctgctcaggcgtaggaatgtatgggatcaataacttcttatcagttgaatgagcgtggataaataatatcctactcatggttcctgtaccaataaggtgaggaggaagtgccttattaagagtatccggtgtgcaggctcctaataaattaatagttggctttggaactttaactcttttacgggttactttagggttatcatatactggtagattgtcgtacaaagttgtcagagtcattagataatctgtatcaccctgcccaatgaagttgacgaactcttctgcatgaatagtcatctcaaaaggatagtcaatattcatatcgaataaggcttctagatcatcaccaattagattctccggttgattaatatagttaagttcatcaagaaaggattctctactcattcggtcaggggccagttgtttatactctgccatcctgagaacctcagttccaatattaatcgccgtagtcttacgagtagcaggaacacccatgaacataatatagaggttcggatagatgttctttggcctaaaagggaaccaatactggcgccctaatattgacccaataagacttatagccgtccagcgattgaaggtatcggggacttctgactctccaacataggcaaagtagtcctggaaaaagtctcccattcttctttatccttccagtttgtatggaagcattccacttccacgttgattaccatttcctgcccatgcacgattacgcgaggagtcaatagttctttaagaactggaattacctgacgagcgtaacctactagaacctgcccaaccagagaatcatggatctgagtcttcagtcttaagattctaggatccttcaaactgagcatgtactgatatgcttttagatagcctgtattcaggttatccactgagaagttctgagactggtgagctaccgcctgcctctgaatcttcttattccttctaggatcaccgaagaaatagcgaacatgacccgtgataggattaatcagcttattagtagtaaggacttccataaagatggattcccaccactgttgcacttcagggaatggaatatggtatgcgtctaaaagttgcttagcaaaatctttaggtgtcttctccttaggagcttttggattaagggtaagaacaactcccagaatcttagcagccagaaatagtgtttgaatatcatctaggttatcgataaaggtttcaggccccatcatatagttggtaccgtgaacaatcttcttcaataccttattacggaattcctttgtaactgtctcatactccatatggaagaacaactctcccaatactttgtagaagtcctttttattcccttcgttgtccagatcggggaagcacaaagctttgatcaacgcagagcatctgctcaggtatgcagtacagatagcctcagccttagaaaagtccatctcaaaagctatgtaaccatcatctggctcatacatctccttagcatacactggctgattctgaatctgagttccaatccaggcagccgatgccctacttgcaaaccggccagtatcagttccgaatggatcaaggctataaagcagtctactattccactgtctgaaactaaagtaggtagataacgccttcttctccaggctgtaattattgactctgtctgagaacagggcaaagattggatgttgcgatgctacgaatgctctcgatttcttatcagtcttagatttagacttagctctgggtggcctcttagctcctaagacttcatagaggaattcagatacctgatctggagatccaggattgaactcaggatcatccgtcattatcctcaaatctttaagggctgactccagtctttcctcggccttttctactagcttaagcctagtttcattgttaaccttgaatccttcgaaggctccgtacagggatggatagaccagtgggaactgtttcttatagttccttagcatccaggtatccccattcttcagcaattctatcaaggccctcatcatcatgtgagtatcataagcagcatacttccagtaggactcaatcccaccaattgccttatgctctctgtcggccatgtacttccattctttatgatcgtaaagtagccatgagcagaggaatcctacgtccttggataactcagaataccagctatgactaagccccatggtatcaaatatccagttattcggggcagcatgatagcgcataagatggaagctatcatatagtccattatggaaacacttaggaatgtcgctgcgcattaccatctgaaggaataataatgcagccgcgtactcctcatctgttttccagaagtcattcattccattgactagaggaagtacaaaagttttaatctttccatccggcattaatccactgaaggatactaccgttatccaggtttcccctagcccattaatctgaagagttgcaggatcatagcaaggaactttcttagtcccccttttaacctgccattgctgagtctcaatgtccccgccaattaccagactctgaccaagaatatctagagcagcactaaacattctagtgtcagttaagactgcataatcgaacttaactccagggactcgacaatatcttatcttcttcagatccttttgaagtaaccattccccttcattggtctggtaaacattggatatcttgtctattactatggacggaatttttgtatcaatgcgggagcctctccaacgattaagagtaggcttaggatcgtcaacaaagttgaacagagtctgctcattgcagataagaaaagcctgagcatttactttactagcaaaccccatagcttcagtgatgcttaggactttagttgtatagacaacattaatcccagccttgccaaatagatactcgatagctttattgtaccgagattcttccgcagatatatttagaagaaccttcatcggctatactccctttccagaggtagtgatctataactagttagtcctctcccaagctgcccagccacccgaaggtttaagggagaggactaagtgcttatagctctaggctacttagatttcaaatagctctttctgagtgattacgatcttgccgagattattatcctcttcatccttggcatccagatgaatctcagagacggcatcgaagttgtgactggagataatttcgctgagggatgctccagaagattcgacgttgaaattatcctctgccaggtctaccagatccacgaaagcttcgtccggaatgttctcagtcagaagcgtgcgcagttcaaagaagtcaaatgcagaatccagcaacagctctgcttgcatcggacgaatagaggaatgaccgctggccagggtcagggttacactgatgatagtgctcatggaattctcctgcttttcaattagggtataaaaaagaccagtcctcctaagaagactggcctaagaggggggattattgcgggatggctacaacattggatacgcggtgattagtatattccttatcatcacgcttgtaggtagtacgagtgatgttcatgcggcctttcagaccggtgccctcagttgccagcaacatttccttataggacatgttatcgatttcttcttgagttgcgccattggcagccaggatagcctgaatacgcgccttaaaataaggcttgccttgctcagtaaaggagaaatcctcgctgaacagactgccaggcttaatcggaagattgccttctgcgacttctaccgggttcagagcataggtcataatgaagatcggccacttaagaggacggccctctttctcagcttcagccttcttattagcatccttgatttcgcgtacatcagccttaatcttcagaagttcgaagtcatagacaccagtttccgggtcgcagaattcgggagctgcttctacgctgcccatggtttcttcgaggaggtcatccagattcatgatggtgctcatagtttaatctctctttactgagttgagttacttctttttaagtcccgccaagaatgacggctttcctgctacaggttcagtaggctgttcagctacttcttccgtagactcttcatcttcccctgcattaggggaaaagaatttcgattcgatcaaggctttgccaagatcaacctgcccattctgtttctccagggctatcccaagtctgctacccgccggcccattgggaactgcgataggagtagacgacgcccggtgagacttgagcttcaattccagcttgataagagttccgaaatacttaccaaggttcatactaaaagccttagtcccgcacatcggataaatcttatcaggcttaccttcttcttctactacgacgacgtgggtagtgcaaaagaattgacaatacttagctgcctggatagttgagcacaagtctgacaaccatttgcccatcatcccgtactcatcgaaagtaggcttgtattctgctggcttgcctaagcaggcagcggccattgctgatgttcctacctgactaagggagtcgattgcaatagcatcagaggaagtcagggtagacatatcaaaggtaatgaaaggattaccagccttcgtacaaacaaggcagtctacttttccgtgagcttcgcaaatcttcttcggacctctagagcacaggcacttaagaagagtctcaatagctataggctcttcccgagtatctgggattctgattagggttactttagctacttcctcatcggtaagctgaccactattatacatccagataatagtttcgtaggagttctcaacatcgaacaggaagagtctcttcactgccttacaacgcagtatagttgccagttgagtagtcttaccagtcttagtctcaccgtagattaagaagctatgatttcgattaggaactgagccagctttatttgcagccttgataacgtctaagagattcataatctaatccatctaaaagcggggttgctgcgaatgaggcccatcataaacacccaattgcaaaattgcaacccccggttttcaaggattctatagggactgtctaagcttacctatatactcagcatccccttcctctaacttcttgaggaagaactctgcctctgcccgagtctggaaataatcactatcccttgaacctggctcaaccaatccagggaactcatcctgctcagagttagtatacagcgtcccgatgtagtatccggcgcctgattctaggaccttcagatccgagtagttaacctcttcttcaggactaatttgtttaaccagttcgcttctcattttctctctccttcattgaagcctaccagcttaccgtcaattcgcttacagactcctgatcgagtatctatcccctcttgataagctagcctattatctgcccatttctttacctgggttgccgcgtaccaacttggataggctatagcctccatgagatcatccgtaaggatataagaatcaggttccctaatatccttaatgtattttatctttatgccctcacctttattaaaggatacagtatagaggtagactagatatccatcagctggagttttgggttcagtctctgcctgtttaataatctccgggaactgatccaccaggacagaggttatagtcatatcacctatatctttatacccattggcaggaactgctcccttggcaaaagtattctcaaccatatcccttggaccggtgtagatcattaggcgcattacgcggatgatatcagtcattgtcagtccccttattccaggccttagttccgtgtcccgtcttaccagcctttatacagtcagaggaaacacactctccttcgtggtctacctgaattactccacatccttcgcagattacattacaggccttaccattatcccagtcttcctgtttagtaatgccagctaagtctccgaagtcctcgccccacattgcgagggaacaagctttgcagaaatcggccatgattaaactcccagataatgacgaagccaacgttcagattcttctactgcctgagcaggagtagctacatccccaaacaaggaagctagttcgagaattgtatgctggcgcttacagtcttctactgctgaatgcgctacacctcctactacctttttataggttgcataaatagctgatgcaactgcaatattcccccggcaaagtcccagtatgtagctattgttatccaggatgttgcgatagaagaagggaagactaagcccaaccatattgaacatgcgcttcagaataattatatcgtattcaggatgagcgcacattacatagatattcttattccccactcctagggtagtaagaacattctgatagcaagccattaaccagctatgcaaagccttaacatgctcagctagaatccattcccctccttctgggaacagatgctggccattctgaacctcaggactactattgctaagcatagtccaattaaaagtatcagtatcccatttattaataggtactccctgaagccaactatcctcccccagtatctgatctagcctgtcatgattgacatacaacattcctacttgccaagcaatagcttcgaaagggttaaggcaagtagcctcgatatccagatggatcaaaatattctgagtcatcatgcacccgctgttgtcatgagaatgtttaacctacgctgatgatcctggaataggtcatccaattcataggtaaattgataatcagtagtgtcttcaacataggctgccggaagatccgaagaagtaaactggcagtcattgaagaattgacacaccctgttaaaggctttgcaactagctcttcgtggataggcctccagtggttccagggtctgaagatagttcacatctaggtaaatcttagtgaaccattcaaatctatccctcaaggttttagggaaggtataactatggaatttgggttcatacagagaagtcttgctacttccactaatctgattaacccaatagttagtatcaaagtcggctaactgttccccagctatagcatccaggatgatagaatagcctatcacctgatctgagtatttatagttaggagttagatcctcccctcgcattgcagttgttttataatctgttactgcgtatctcttggtcctcctgttacgcaagactagatcgagatagcctacgtaataatatttctcattgatattcaggcagaagctaagctcagctgcaaacttcccattgaaagtagcaatctcccactccattagtttctgctcgtggaatggtacagctgcctcaagacagaagatcaatctttccaggaacctttgctcatcctctaagaatggagtgtatttaatgaaggcttcccagattgcagactctaatgctactgcactggtttcccccatggtcctgagaatcatatagagttgggcggctgctccataagcctttccaaatacagtagctggagtatcctccttggcatagggattgtgcagtagcttgattttctgaagcttacgctcgcaagaatgcagaagttccagagttgagtgggataaccggagtctggccccaggatcattcatcgtcatcccagtaggctcaggtgcatcataagcagccttgacatccccgagttttgagtccaggtcaatcatctcaagtctccgaatcccagttcagccttactccttgctggatcagaaaagctttatgagcttcgtacttagtcttgatggccttaagaagttcagcatccaaaatttctaatgcttcttcaatcttctccagatcagaaggctcaaagacttccccaaaatcccttactaatctagtcagattggacagataccctttagcaaacctatgatgcttagcgtagtaatgaacccaaagactacgcatgttataggattttccatccttgcagatctctagtctggtaggattctggaagttataattagtcatttcggttctcctgctttcagaataggaccttcccttggattctccaggcccctaagttcagcccacctatctgccctatccccaggagaattgaatttctcaactattacagtggggtcatcagaccaatggtagaccagatcaaatccaccttcttcttcaaactgcttgctgaaattcatggcgaagctcctattagaattcactttgaattgctgccatttcttcaggggttagagctacaggcttttcagtcttagctgcctgtttccttggacgagccgcggccatatctgctgcgaccttattattagtcatcttcctcaaggcccgagtcatcagttgcaagtcttcaggtagcatcagactacaggcatcagcattagtcaggagaacttccctgagatccttcattgcagacttcaggtccagtccttccatcatctggagttcgtgaattttctgcctgatgaattctagggtagccccattatcagtcgatactgatttaacttccttttccttatcctcagccatcactccctgactaaccaagttagcagccgttatgacattattcaaaggcagctctacagtctcagtctgcttagccttatccatccagggcagggaagactttggcttaggatcagttccttctatatcatccagcatcgttgaagcctgatcctgagttggcgcgggcgctggggctggagtcttagacttaagacgggcaagaaaagagttgaccgctggactccgcttagcctcttcctcagttacctgattggctacgaattcctcagctgattctggagctttgggaatttctacaggactcttagaggctgcctgttgcctagccttttcccgaaatgctttaaagtccatgattacctcctattagaatccactgttaggcttgtgcagaactgctacttctttcgccttcttcttggaagggaacaggactacgacaatcttgttaacctttacagatggatcattaattccccaatctgccttctgctcagtagtcaattctgttactgagaagtccagcttaccctctactcctttcctggacttgcgctggctcagcctacgcttaaagatcgtaggatcttccagggttacaatctcgaaggtggaattcgagataaggtcattaataaggaagtcatagtccagcgtaatagtggacattgcttattctccttcgggctttaaatatctactggattctccagtgtttatgaaatgggttcgctcagcaatataactggctagtataccagccttagaccaagccccgttataaagtctgctcagactt

SEQ ID NO: 7 - DNA, 91670 bp, Unknown
  source: /note="Description of unknown: bacteriophage strain capable of infecting bacteria of the genus Pseudomonas"
cccaccatttatcgaactctttgcggagtttgatgttcatcgcgtgaactccacaacccatacagggttgatcccgccagtgaagtctcgacggattgtagcagtccatcccatatctatcaagatatttgtacgagagcacgctgcgctccaagtgtagtacacttcagagaatttgttcattttagtccctccttgttttgatgggctcagaatacacaaaggcccggaagctgtcaagccccgggccaatgattttacatgcacatttcacattcttctgttctagagatatccccagcacctcgcatactatagatgtagtatagcgacaggatgttagggtcttccatggccagacgatggatgtacgaaatgtaagccggcgagtcgttcgacgtgaagtagaggttgatcgactgcccttggtcgatgtacttctgccgctgagagcacagacgcaggtagtcttccattctcacctcaaaggcagtacggaacacagccttttcgtggtcagtcaaccagtctacgtgctgaacactccctttacgttcgttaatctgccttgcacactcttcccaatcgaggcctcgctcttggataatctccagcaacaccttgttgacacggaagaattcacctccagcgctctgcttggtgaagcacatagcaacgtccagtcctatgccctcagaagccccagccatgagttctgccgtcgatttagttggcggcatcatcattgtagtggcattacgcttccctagtccacggcagccctctggctcccctagaacctcagctagccaactgttacaagcttccgcttgctccttcatacccttgaagatggcgttgttcaggaacatagcatccatactaccgaccgggaatcgctcccgctgtagcagggtgtggaaccctagaacaccgctgccaagcgccctgaagtccttggtgaatcggtaaatcttctccagtgctcggcggtcctgaacgctgacctcatccatggttgctaggtattcgctgatgttgcaatcagacataacctgaccaataaacacaaggtgcttaggccaagaacggtaaagttcgaggttgtagttcaggataacgcagctaaaagtataccagtcatttgccgggagaacagtctcttgacaaaggttggacgcttcacagcgtagacccgcccgtttaaacggctctgcaaggtgccgattcatcttatcgataaacgtgaagtagccttttcctctggccagcttgacgaacatcattcgcttccatcgcttcaaggtctccgggtctttctcggccatatccttgcaccactggtcgtctagaagccatccgacgttgttcgactctgtgcgcttatacaggtgatcgataacgttccagaagtctccatggcgggggttgatgctgtatgcacagctaccacgcctagaaccctgtgctacctcttccatgacgttgataacgtcccgaatgacaggcatcacaccttgagactcaccgcctcggatagcgtctccttctgatggccagttggtcaggctaaagcttgtgccatggctgtgcttcgttagcactgcgatctctgtcattacattgtaacggtcatagaggttgttgtccatcagaccgccagcacaagataccgtagtgcccttcttgcggagcccaccgttcgacagaagcggagtggatgggcttacaaaaccgtcccacataacgtcgaagaatacctgttcccagtccttgcctctagtgtattcgtcctcctcccaccactcaggatacaccgtaggggcgtgctgagccatagcgcgagctacagcttggaagcgagagcgtacagactcgccctcgttcgaatacttcttcatgaacaactggtagccagccgtcgtataccatagaggagtctcgccggttgcttggctgttcttcctagcttcggaatagttgaacgtgtctctcttactcatatttcagctcctcttcccaagcctttgccaattcctcttcatcccaccctagttcgtattccatgcccatacccggagtgaagaagtcgatcatcttgtaggcataagtgttcatttcgaaccaatccttgatcggagtgtcatcgttttcgaagtgatcttctaggccgagtcttcggcaccagacattcaaacgataacgaacaaacgctttatagttttcagccgactccccattaagttctccgcccgggatcgccatatcgacaatacgacattcatgagcatatacatggtcgatagcttgtcgaatcttctcgacacgccgagtatcttcagacaatggtctcccaatctctgcgtagtattggttgatgatctcagccgaaactacaccgtgcaagtcttcatccacagcactctggttagccccgcgtgcgatgacagggatatcgttatacccgttgcactggaagctcttcaggatagcgaaagaactgaacagaagggcagtctctgttaggctgaagataattaccgaaagaacatcgtcttcatcgcctaggacagactcaagccaatccattcgacccataagctcggggtcatccttgtaagctacatagtcctcatctgtatccatccccagcactacgttgatctggttgtagaattcagcgtggactgccaattccatcatgcacaggatcgaagccgctagtttaacctctgggcgagggaacgttcggactactttacccatccaaaactcctcccctacgatcagttcgtatttgaggaacagttgaaggacagtctttacagcgtgaagctgatgaggttccaacttaaacttcaggttcaacttatccagctctaccttcatttcgctagagaaccacaacttctcttctagttgctggtttgctagttcgacaatgaccggatatttccgggcataggactccgttggagtcctgatttgtgtgatcttattgaaaatatcggcctcatctgcgagagcctttgtaacttccatatctactcctactgcattaattgtggaacgttgcctctgtcgatccctctggtcgcatcttacgaagagtgaaccgtagattactatcatcacacgctgcaatatgagcttccagagaggcgcaaccgaggctcagccactctttatctgtccgctcaaagccagagaatcgtagaccctctacgacccggccaatcagtgtgcgatgttgacagaaaaccatttcatacgagtagtttttaacatccatgccgttagtccacagatgctccctcactaccttctcattattactctggaatgcctctttgaagccatcgaccagcatgaggtcttccagactcaggttatattctgccattttaaactccttcctcttcttggccgtagtactcattacatacgtgccctttaattagttgacgatgttggatgaaacctcggaagttaccagaccagaggtcaccatattggtccaagtgcgtcacaccgtcttcccatccagtttgattgtccgagatgcggagcatcggtgttgcttggtgttcgaacgggctagcgtgaacgggcttagtatctaccaatcggttgtagattacaagagctttctccagagtctcgtcgttcttcctatagctaacctgagcacagcagctagcagataccttaatagcatcctctacgctcagttcttgcccgttacaatctgcgtaacgcagcttaccatcccctatgcggaaccgagtcacataaggaacatgccactctccgtcatatagagcctctgccgggcccgctttaataagagcctcatacattttctcagcgagaaccttgatctccggttgtgcgtctttatggcaacgcaggtagaagaagttatctagttccgtggctgtaacaacggtcttcatcatctggaatggctcaaggagacggttaaccacctgcttgtggagtcccattttatttagtgcgctagcgatccgagccgcactctttgcagccttcttccacaggtactgagagctacgctgcaaacactcactcagttcgaactcagcttgcatacccggttgattcattccccagtgaacaggcatcgcaggattctcttccacctgtcggatcatatgggcaacgggaatggcacgactacttgcagcatttcgactaaaaagtcggtgagtcataagttcactgtgaataaaccgaggatactccagttcgaatgtagtgatgaatctgtgattcttcgtacctaggccgatccgggaactgtgttgaatcacttttgcagaaatttgcataaactctccttattaaatctttgatacaataaagggagccgaagctcccttgttttactgaagcattgcgaaggtgaggcaccagacgatctcgctagcgaggataggatgcaccatcatgagcttctgttttactttctgtatcatatctacacacctccttcgtttcaacttggagcctattatcgcaagcctcggggagaatgtcaacccctttctctgagaatcttatcgatctccaactgagcgaagaagatgactttctcgtagtcccggataacatcgttaccggccttcagcttgcctaggttctgtgctgccgcagcccgccacaacgctttgaacatgttgccttgaccgaatcgcatatccagcgcttcgatgatatcgttgcactctgcaaaatacggcatgttagccttcgtagtggggttgttcaccttgacagtgtagtaactagaggagcctccgctacctacagcctccttgtggttagccatagcttccaatgtggcatagttttctttgcctaggtaatcttctaggttggcgaacacaaccttcttacccagtgcaacaagctcttcattgagtctgtcgacctcggctaaagcctcgtccctctcacttagttcgtcaacttctttgtgctctactgtctcgggattcccagacatagctgaaagttcctcatcgtcggcagtgtaaggcgacagaacatttttaagaacagccatgttgaatagtggcatccctttagggtcgccgccaatcagaaagtctccgtagtagcgctcactgtttgtcaaaggctgagcccgatcccagttaacaaaggtagtcgccggagggtcttcgaacagaacatcatacgcttgttcaacgtcgccgagactggctgggttataacctctctcccttaggaggaagaaatcagagaatctacataccttaacagagtgctcgtcatctgcaccactcgccagccttacgaccaactctcccttttggatatcgccccttttctcggtaacaaccaagactgtgccgtgagggatggtatcggcgtcccaatattgaatattgataggattctttgaccgttgcaccagagaaatcggttgcccagcatgaacgtcgatgatatcgttactcaaagttcacctccatatctttcaactcttgaaacccgtcaagactctcgatcttagcgcacatcactctcatagtgacatatcccttcagtacacccttcggacctttaaactgactctctaggaaggccagcagggcatctagccctgctgagtcaaccatgagatcgtcgccagataggtcttcttttacaatctcttcggccacttgttactcctcgtcgctaatcgattcacgaatgcagtccagaatgaaggacaggttcatgtgcagagtcaggagatcgtctttggtctccggcatcgcagcaaccaagatcatcagcttcaggaagtcagggccacccattaccagaggcagatcacccaagctggtgcggatgtgtcgtgcaagcatgccatagtccagttcaccgtcctcggtcactatggaatcttccagagatttacggtcggtcaaggctttctctaccagagcccgctgctccgggttcatacctgccattgcttcttccatttgctcaggggtgatgttgaaatcagtcattttatatctccttttcgattatttagatttacggtctttgaggtcgattttgaaaatagcgccactgttgcattgtacagtagcactctcgaagtggtcaactccgaaatgcttaactccctcattctgctcgcatgtcgagagcaccttctcaatagattccgaggttaccatcacgcccatgtacagaaagagcaaacctgcaagggccgccccaaggaaaaactcagccatatgccctcctattaaccaatcactttaacagagtcgaagccaagcaggcctgcatcctctagttcctcaatagtatcctcaatcccgcagtctgacaaggctttagctacatcctcttccatctggtagtagtctcgccacaggcattcattaataccgatatcccattcgcaccagaatttataaaccgtcatttgaaacctcctttctccatcatgaagtccagacttactggcataggtagaccaaaaccatctttcacttcgtgaatcatcacgcagccacggaagtgattgttgccttgatagcctttgtaagcctcgtcgtgaggatagcacgctccagtcacaatgccaagcctttgtttaccatcgattgtcggatggattgcccagtccagaagctgacgatgccccatgacaaacgaatgtcccgcagccttgagcatgttgttcgctgtaccacctagaggcttgccagtgaagtggttttgaaggtagtggacgtagtagatgccatccacttcaataggcttgaggaacgggacaacctcaaaaccgtagtcctgaatccctagctcatcgctacccacggtgccatacaactcagggttatcgttcgctgctcgatcagcccgctcttcgtggttgcccagtgtgaaaatcaaccgaggttggtacactttcttccgattagcccgttgacgttcctgtagctcccacagaggcttgaacagtcggtccagaccctcacgtccgacttgaacgtcttcagagtacctacggccctcagaggagcgtttacccttatcgtaggacgacaggctagctaggtcaaagtgatctccaatgtggatcacaacatccgggcgtttggctacgatgtatttaccgatagcttccatgtagtccagattgatacccggcttgcattgtgtgtcagaaattacaaagtgtttcttactgctcattctgcctcctcgcagtcttgtccgtacagaaatgctccaatgtcctcatacacagccgtatcatagcagtggacgttatcaaggagattataagctctttctaggagttttgtggcttcctctaggtcttgtttgaggaagtatgctctcgggtctgtcatgctcatttcgtctccttcagtagtttaatgatcgcgttatacgtgaattctctgactgtcaacagaacatatccgtgtcctgtgtgatccggtacttcaaatccgataacatctcttagcaagtcgagtaccaattgattctcatttttcagagattcagctatatcgataatctcgaaagccgattgattcttgaaagctgcggcctctcggctagccaaacgagagagaccattctctactatcatagggatgcttaggtcaggccagcgctccatatcctttctagcaacgtacgctccgtgtgcagtaccctcgtaggcgtttctccaagctagagccgcagccccttttgttgtccattgccgcttccctttaggagtagtccaaagctccttagttttcttgtggcggataacgtatgtagcaagactggtcatagctcctcccctgtacgaagacactctatcgctcccttagtagcggaaatgagtaccgagtatccctcttccaactgatcctttgcggtacagaagaagtctataactccggcgatgagcgctgttacaactggcagccagaagaacagagcaatccaaatcagaacgatagaagctcgtactctgatcggtagctttcgcatgattttaagaaacttctctctcacataggcctccacagttttgcaaatttaagaacattcggggtttcctccttgctaagaggaggcactactagacaggagccttctccgttgcagatggttctctcatacccctcgtatacaaacgggattttcttgatcttgttgtactctttttcagagactcgtacaactattttgcggaagctttcttccagccatgcgatccatttgcgggtgaacatatcttctgcctctacctgatcgtctagaggcggccatttaggcgctctatatctcttctgagcattacgatcagcccctaggatgctgtgggcgacaagagtcggcaccatgtactctggtgcgtcgtctctcactgcaatgtatacccgatcctcgttcatccaccctccttcttagacttaaggtattcaatgatctgttcttttctaagctttgcgttagatgcaggcttaattccagcttcctgcaagaagaccttatcataccccttctgcttctgtattgcaatagcctgtttcacgatatcagcctcttctagggtcagcccgtagcgctcggcgtatgtcttgatctcatggcacggtttgcacaagacagccaaatctcctatgcggacaaacaccacaccttccacgaacgcttggatatcctctactcgcttcagggagaactcccccgtcttgtggtcaatctcaacgttagcttgaggagtctccttcccgcactgctcgcacacatagccccacacagtagggtgcctaagcttgctcttttcactgggattggttatcctaatccttcgggatttagcaaactcaagcttgactgggttcttagaccagagatagcggcgaatgccgcctctgacccaattcaagaacgccgattctgtctcccagatgcccgggaagtcctcccaaggacgcgcccttacgctcattctgcacctcccaaatccactccaagtttagccaaaacagccctacagtctacccggtcccccgcccaacgttgcatgtgggcgcagtcacaatacatttgcatgatatcgattgcatctttagtgtgctctgtgtcgtcccatgctgtgtaagtgacaggctcaggataccacgatttgtaggtgtcgtagattgcttgccagcactccttgtccgttgtgcagggactgatgacgttgtatgccgccacttctccaaagtctttccctacgcacaggtcggcaggtctgtagcagtcaacagggtcgccgaacagcaactggaagtagaagaacttacgtccctcgcctctcaccttgcccttagagtccctgtagagcgatcctaggcctgaaatgaacttgacttgaacaggctcacgttcgtagttacaaagccatcctagagtgccgtctgcgtctttatcgatggtagccccgatcacgcgctgagtagtctcccctctggagtagcttacaccgttcttgtacatcatttcggccatcaagtcgtccgcttctccgggatggatgatggtgtcatacgcttcgatcatatactgccttagctgacctagctgaagaggcttaatctgccctgtacgcttacccttgtacctgccgccacgagtgaaggtctttttacccttggtaatctcgtactctttcgggaggggaatggaatcgcggaagttgtcaggaccggacaggagaatcttgaactgcttgcacccagcttggcggcagattcggtcgatcatggtcttaacaacagagataccgtaggacacgtgcttggggtcttgatggtcctcaatttcgaagttgtcttcgttgaatccctcttcgtctttgttattctcccgccaagtcgtccgattcttccaagtttcctcttctcctgtcaatttgtttctgacaatgatggagcgggtctcgttgacacttgcacacttaaaggcgataaggtcgccgtcgatgaggacgatatcctcttccttttcactcatttttatctccaatgaaaaagggagccgaagctccccttgggttagaactgtacaacctgaatgtcccactctgtttgtagagtgtcagggtttaccttgttaggaagagcaacataagccggctctcctttaatgatacactccgcagcgttcttcaaatctttgaagagatttcgctcccacaggtcaccgctgaactggttgtttactgtgggaccttttagaatgtactcaggtactcgaacaataaccaaactactcatcattagtcctcacttattccggaagtgctttttaaagctaaagttcagtttactacgatcaccgaatgcgtaaatcagacctacaattacaagaaacagtacgagaatcgacaatacaattacaagaggaatccagatgggcatgagtgccacagtccaagagatagcgagaactccggcagatttcagtacacacagaacgatagcagccagaaggaagatgggaccaaaattgatttgcatgtgttgcctcctttgaatttttgaaaagaaggggccgaagccccttgtcttaccaccgtcttttagaacggaatgtcatcatctacgttggtttgaaccggctccactttaggtgcagcttgggtctgcggcttatcttcagcttgctcttcgctgtcgccactggagcggttaccaccgcgtgcagcttcaacagcttcgatcatcgccttgatatcagaaccttcgtagttcttggctcgcttgatggtgttgatgacgttggcacgcagttgcttaactgcctcttcgtcgttctcaccatacaggttcacgccgtagatgtacttctcatccagttcagggaccggaacaccttcaggcaccataccgaccagactgatatcctcggtgaggaatttcatgtcgtttttgcccggcttcatccacactcgaacttggaactgagccactttacccagaagctcgcctacgcggtccttggtgaagagttcgtcttcgttgatgacgccagtagctacagccagtttgtgcagcatggagttcttagcgaacgcccatttgccgttcgggtgcttcacttccttgatggtaaacggacggccaacaatcttagtcttctgacccggcagagtaaagtcgccgttgtacaggacacgaagcggagacttgttgctgttaccggtcaggtataggctcttgtctacctcgatctgagggaagtccacagtgatcgcgatttgttgcatatcgcgctgcggccagcacttcagacgtacaggcttgcgagtctgcttgtccagtccatccttgaagtaagtgttcggatattccttgatgatttggatttcatcttcggcagtgccagtgaacacaacctctgcatcgttctgctcttgctcgccgagatcgatgataccggagatataacccgggatcgaacgcgccttagcggcagtgccggcagcttcaacgacatggttgttcagagcatcccaatcgacttccttgcgaatgccgccgttgccggattgagtgttggtagttacgttcagtttaaaagccattttatttctcctatttaagtaccctagactgggcgagtgtgtcagccacttgactgacgattataccggacattcccggattcttcaagaggagaagcgcgttaacgcacctcctctcctttgattacttttacaatcgagactccctcagccttgccaccccaccagcgcttggtggctcgcgcttcttcgcgagtgaggcagaatttaagaggactcccgtctgcatcgagaacagcataacccattacagcaggctttgcaaccttttctttcttctcttcgtcaaccggagcttcaaccttaacctctgcctcgtcctcttctttgaactcctccagcacaaactcgggatagagggtctggaactgcaactcgtcagaggtttcaccgccaatgtcaacgcgtcctttaaaagtcatgcagaacgggctctccccttcgtgcatgctcttcaaccagcacgactcgaagccttcgtacaaggctggttccgaagtaaccaagtagtgggaaatcaagtcagggcgtgcggcaacagccttaacataatacttcttgcccgggaccgctacaatttcgaagcggtcgttgtcagcgagcatcgactggtaatctccaagtccattattgacgtctcggtcaatagaccaatggagggagcagaaccggatttccccttccgggagaccgatatcgcgtccatctactgcgactgcgtatgcgcctacatatcgggcttcctttggccagccaacggtgacgtcacatcccacttgagtgagtttgacgatagtcccgggaataacaccagacatattatttacctcctttctgtttgtatttgttagccacgcttttgtgggctaacggtgtctccgatacctcgaagcctttagaggtatagtactcccgattggccttgttgtcaacagtgattcctaccatggacgatttgccgtagacgtagagtcgagccgtgttcataccatacctcctattctgtgattaccgtatcactcgctgctgccttcaacagccttcagagtttctttcttagcccgcttaaccagagcttcgagcagttcagtagattcgctgagaacctgctgagtagcgtctgcttgatagaggctctgtgcagcgtacccgccaaccatccaccatgcggtctcagacgaagggaccagatggccgactacaatgatagggaggaacagcttaaatgtcaagggctgtaggtgatttttgagtgtggctttaactgccgcattctctcggccaccaatggatgccaagtaaacgaaccctcctgcaacccatgcgatgatggtgacgaacagggcaaagctaccagccgacgacaaggctgggaatacggtcattaccagatagataatgaaagccagagtcattgtgtttctccttgtatgttgtgaatatgtggccattgtataggaggcggaggggcctgtcaagcccctttcctcgcttaatgctagttttagtggcaatccttccaagatcgaccaacgatgtagccagcggtcagctcgataggcaccagaggagtagagtagaactctcccgcagctctcacggccttcgtggcaagttctccagcgcggcagtaagctacaaacaccccgccttcacctttgctgtagtgtgcgatatcactccacaccttgccagtgctagccaattgttcgtccttgtaagcctgagctagagctttcagcttcttctccgcctcctcctgttccttttctccttctggcttaccgcctacaagagaccaagggaacatcttgaagctcaccgacttggcggttacttccaactgcgcttcgtcgtggtacgcgatcatttgttggcagaattccggcttgttcttccagtcttctttgaaaaagtcaaccttcagaccttctttctccagcagttggtcatgaatcaccatagcacgtttagcacagataacaccgccactctggaacaagctgttcaggatagcgtgagccgaacgggtaggaacccggcgaccgtccactccaacaatatacttcttaccgttggcttcccactgtttggtcagatcgtccttcagagctttcaatgggaatgcagcatcccagaaagcatcaaacaccagttgaccagtttgcaagtcggcaccaatggttttcgccactttaccagcttgagcgccgtatgtaccgttgtgttcagggagggtcgttaatcctcccccgtaaccttgctcaagggttaccgctgcatgttcccatgcagaccagactatatcatgacgctctcgcgccctgtgcgcttcgggtcacttgaccctactctactcccttccggctcccgccgtggtttcgatagtcgttgcacctttctagatcactctagcttggctcaggattgactgttctagtcttcccctgaattcacacagttttacatgggcttgatctcttacccatattttacgtttttcgcaggagatcggttaaattggcgaccaatgatctcagaaatacgcttagccatcattgtgtgaacgtcaaatggcttctccatcataagagatttgcaatattcctttgtcggatcgtactgatcgcagtaggccgactctttacgtgcttccaaggaatcgaagtcgtatccaatttggaagaacccatctccaaccccaaacaactctcgaagctcagccccgtacaacgaggtgatccgaggaacgttagcaaccttccggtgcttcatccggctagtagcagccccgcaagtgtcagcaggcgtgggaatcctgccgtcctgacgaatgcttgcaaggtaacctttttccggctcctctccatcctccatttcgtcccagtccatgccgccaccgaggattgcgcttcgccggtgcttaaaggtcaggtactcaatcacatccttcgcgaacggaaactgttctgcaatgcgttcgaggtctggacacatttctttctcttggccctttgtgaagctagggttagtgagaaccttacagctccccttgcttgcacgatcaatcaacctctgacgtacatacgcgcgggtgctacgaggggtgatcttcatgtaatccccgaacccgtccagccgctcttccttgtacgctgtgctatacgttacatccagccagcgatcgatcttagcaacgatgttttccatcggcagcttgatcttcttctggtcgacagtgaggtccgtctctttccactcagagggaatccaaccgaactcgcccataagccactgcttgatgtgggttgtatctccaatcttagcaggcatctccgttttcagaggtacgtctgccgggagaggcagcttgtactccttaccctcaaagatcatagtccgatcatcgccctctttcaattgagcgccgatcttttcaatgaacttctgtaggtaagtggtgatctccccgttcttcttgaactgtcgaacaggtggagtgtagtctgccatgaatttcttggtagctggtcgaggaggaagcacaggctctacccgggcccgacgctcttccatcttggcgtccaagtctttcacagctttttcacagagatcaacattcagaacaaaccctcggtgctcctgataggtgatgatctctgcaaccttcttctccaactgaatcggggacagccaattcttgatgtagttgtcacggtcggacagttggtaatcttcgtggtcctgcaaccaatgccatacagcggtgttcgcctttacgtcatagatacagtagtagagcatatcggctgcgaagtcgaggaatcgaacatccggtgccaaatgcttacggaagtcaatcttggtgtcaccacctgcacgacgagacagcttatccagactgtgaccgccgaacaggtcagggttacaagtcttggagataacgagggtatcgtcgaataccacttgcttgcccatccaagtgtcagcagaccacgtagtcagaccgccatccctgtgctctacgccgatagtgaagtccatatcttccacaagcttcatcgacataaggtcgaagttaatcatgttgtgagccactacgcgcttgatcttgcgcttgagcacatagttcttgaactctttcagcggcaggtgaatatactctaccggagtgtagtccttgagagtcacaacttcttcagtgtggagcatggaagacgctttcggcagtctctcagtgtactctcgcccgtcaaagacgtaggtcggcccatcgtagaatgccagaatattgccaccgtgctcctccactacaatgcagtggtgtttgtagctaggcttaatcttgtaggggctggcagtgtaatcgatagacgtttcatccaacaggcctgtggcctcgatatcccaagtcatgttggtgaaattgttatttcccatccattcgaggtattgctcgattgtttcaaatcgttgttgcatttcctttcctcctgtaaacgacgaaagggatgatacataagcatcacccctctgtcaaccttagtattccgtgtcccggccttcctcttccttctgagccatccaagcctcgtattcacggcgcttgtcagggtatcggtccagatagtcgtccaagtcccagattgtatgagtctcaacgtcgtagtaccaattgcccatcattccagtgcggccagtccatcggcacttagagagcttcacgttaatcaggttcttttcgaactcgttctccgcgtccttgttccgccacatcagaatgttagctgcaccagatttgaagatggacgaagacccttggaaatcttcttcgtacagttccgcacctgccgagttagccttctgaccgccaccactcttacgaacgtggttgatgttgatgaacgtcacacggtggctcttggtcatacccttctgccagcgcatgaacaccgattgctcttcattgctcaatccgtccagaatatcctgaagcgggtccagaataataacacggcactcaaactgaataatcagttgttcgatttgagccttgagggctgctaggcttccgtctcggtcatcgatcagatagaagcgtgggcttccgtcttccttgtgccacaagtcgtaccgagcgtcacggtgccgatcaaggaacgccactttctcttcaacggtctcgtacaagtctgccttctcacctaccttacggctcagcagcttgattgcgtactccccgcagtccgattccagagtcacagtacccggcatatgaggcgagttataaatccaaaacagagtgaactcatccactacagtagatttacccatgcccgatgcagcgccgatattcacaatccggcccaacgggatgcctcctgccatagccttctggagcttcttagcgaacggtggcagaggaatcttctcaacctgcacagcttcatacattcgagcgtcgagtgcatcagaccctacaataccgctaggggtccatgtacgggctcgatagaatgcactgacaaactccgattgacgcccagctttcaaatactcgttagggtctttacggttcatttccatcatgaacaccttgcccttcggaagcttatcggctgccttgtctgctgcctctcgtcctgcgtcatcgctgtcgaaacagagaatgatttgctcgaaccggtctagccactcatactgagcctgtagctgcttccatgccccactctcaccgatagtagggctgaccactggagtcggttcataatcactcttaccgcctgctcgccggtcatcgtactccttgagcatctggaatgctgatagctggtcaacctcaccgcctacaataagcaccttcttgctgttgctattcttgaacctgaactgaccaaaaagctcgcaatccttcccggtctcgccgataggctctgagaagttcttcggcatgatccgctgtttgtaaccggtgagttcgtaattagtagtagtaggatatagctgagttgcaatctcgccagtctccgggtcgaaaccatgtagcactccgaaatactggcaagtctctttagacaagccacgataaccacgcggatcatacgagcattgctctttaatttgagcgttgatctctgcgttaaattcagttcccacgaaattccactcctcttcgtcttctccccgggcgtctctttcctgctcttcagagagcaaggtgtacccacacgcccaacaataggcacctttgtgttccccggtattacgatcagtaccatagacctttaggttgtctccgctgttgtcagcgcctttcttccggcattggggacaagcggtcttgtggtcagaatacaaatcgataccgtgcatagccgcaatttgggccacggtcattttggacataaaacctccttacttcagacaaccacggagtttagcatcaccttgtgttcgtgtcaacccctctccgagacgtattggtcccgcattgcacggtccataggaacagccacctgatagccggagcccagagtcgtgactgtccattgatctacagcgttctctgtcaaccactcattcatttccgagaacgtgtggaagtagatgtatagcagattgtggtttctcagtgtagccttcatggcgagtcgccttctctcatatgattgaatggcgagaaatccgcataatcttcgaacggaccactccagtaggtggcaaactcgacctctgtgagccttccgtcgttctggtagtaaccgttctcgtaccctccacactggtgacacatgcctccagtgacttgctgcgtccatccaagcccaacgtctacgaactcagcttcagttttctctccgcaccatctgcactcgggtccgttcattataccctcctacacctgcttggacaactcagaacgctcgaagaacaggtgaaggtactcgataagctctccgctttcgtcttcgtagctgcccacatcaataacgcaaccctcttcgtctactgcgatgatagtggcaacacggccccggaagatggtatcagcgtcatcattgatcttcactttgtcacccttcttcatttaatcgctccttctgtttatgcttaggcttccgcctgtatttggttttatccctctctaccgagggtttgttgactgtgttcagaaacttaaacacagggttcttcttagccatagaatactcctgatccacatttactacaacccttataccaaatgcccgtcttatggcggtgcatggtgggctccccgaagtgcatacaccggtagcagagtcgtttcatttgtcctcctataaacgtgtgaagtctttcagcgggatatggaccataacttcttggtcttgccagtctccacggtcaatcctaccacccatgctcatgtagttgacgccattggctgtcattttgacatatcctgtatagtccgtccactttaccacaaggaatgcgggaatgtcaaacaccctttgcatttcgatcccatggagccacttcatctgggacacaaagaagtcgggatatttctgcatttcattattccgagccttaagctccacaaagctaacaacctttccattccggcaggctgcccaatccatatagtgggctctaggtagcttatgaagagaacacttccaccgcccttcaagctcagaacggacggcctcctcgaccgccctatctgatgcagactcgtaagtctgtctagccactcaaacctccttgaagaagacgtactcgaaggagttggtcataatctgcaacttgccctccatgagtttgccgtccacgccttcgtcttcatttccccagaatcggaaacggcaacgctcgaaatcaagctccaagaagctaggctcaagctctcgaatatccgggtcaagaacatactcaggtttgatataaaatccgagacaagcagtgtccatcacatcccagccgttccagtgggaaatgaagtagctctctagcccacgtgcttcaactacaatctcatcacgcttactctgactcatgcttacacacctccttcagttttaatagagaaagaatctaggaaatcttggatatagggatcgagttcgccaactgcctcaataagccgcatgcactgacgctcattatcttcttcttctaagattacaacgctcatatacttacgccactggtcatacaactccattgttcacctccagttgaatcttggtcaagtacataccttgcatttcatccaagaagtaaatgagttctccctgttccaccaccgtcctgattagcgcccctgctacctcatactgtagaatgaggtgtacgttacctttcctatcgtaaatcttctctactacatacactacgataggcgaggtttcgtcttgatttacactcacaggcacgtccacttctacgacttggccagttcgtagctgctcgacggactcattcagtcgctgagcgttagccggagattccataaggtagtcgtggtcacaaccgaaggcctcgtctagggtgcttacgggagcttttgctgccttacatgcgatgtaaagatcagaagcgtcaacaactacaacagccctgtggtcagtgtaggcgtctagacgtactgcacagcactcttccttcagtcccagttcagtcatcacaacggtgcctttcaagcctccggccagttcgtcggtgtggacccagctatcttctacgaatcccgtagccagcagttcatccaaacgtccatgcgcctgcgcccatcgctttgcacatccagtgtatgtatcgcaataggccttaaggaccacccgatctcccacttcaaccttcataatctcgctcatgctttactccctctgttgatagctcgttgcttctttgcctccatgtaggcatcgtattgctccactgtccacggaggaaggtcattatccacgctgaacgggttgtcgtcaacccatacagagacttttattccaagattttccatgaatggtcgctttgccttctgtgccgtgaaatagatcgggaacccgtagtcccgtagccactctaactctccgctgttgtcagggtggcgtgcagtgactacgatcacattgaaagcgcctccaaagcccctgaaggtatccatgacgattcggaaggcaagagggtagagactgatcgtctcgtcgtagtcgaacgcaattacgaaaggttcgcccatgaatcctgctaactggtccatattatttacgctcctttgtgatatactccgtggtggccggtgccacaggaatgacaggagacgcaacccaagcagacacctcttcgtgacagacagggcactctgcgaaataatacccagtctccccggggcgacagaatgagaacgaaacatactcaagttccgatctcttagctcggagaatgcttaggcaatggtgacacttagcagtaaacaaagcctcttgaggaagcgtccctctcgaaataatttccataaatcctcctctttgtacttcagatgtttgtgtttagacataccagtccggggcctttctcacaggaggtgagattggatcaggcttcctctcgattttctcaggtgcctcccccggccacacttgccagcagtgccagatggtacgtctcttgtcattagtgtgatcgtacaacactccgtcgacgattgcaacagcatgcccctttaccgcgatccagaaccgaccttcagggttttcctcagcaaactgcctaagagtcttatccttagcatcctcccggtagagcatccgggtcttagggcaccaagtgtctgcgtagctgaagcgcttctgagtagccccttgccggtaaccgcgcttgcacttcactttcaggtgctggtgtgccttttcataggtggtgttccatacgactgcaaagctcaccaccatgcagtcgttggtttcgccatacctacgagaagcgtcgaagaacctagggtaagggtctttgaaggtagctttcgactcctccacggtcacgcacctacggttgggaagcaatctgcaagagcttcgacctctagctcccggccatcgtcatcgaagtatccgcagtcgattagcgaggcctcataccagtcccagttgtccaccccgccagcttctagagcttcaagcttcatacgatcacgtagtaggtcgataaggtcttcacggtgaataacatgcttcatttatacactcctctgcggttgatttgagattactctacacggtttacaggatactgtcaagctcttgtatgcagatagatcggtagtggaggcagacctgtcccaaggcttgccatacggattctccgcctaagacatgcctctggtctgcctctcgctctcatgcagatatacgcatatgcagatgagtcggtgagcggggagcatgggctccttataggctctgagctttcccctttcgggtcgtcgctgccctgttctcagattcgactcaggatgcgcttgcagctttcctcttcatacgctatactgctggccggtgagtgacgtggacatttctctccagcaggcctcacactttaccacggattattttcttgtcaaggctattgacacagcagatgaatccatgcagaatacaacgactttcaacacaacaggagaaaaacataatgaagattgatattcgagacgaggcaagggaagtcagcgagattgtcttcggagacaatgtagcctgtgcctgcgggcttaaaaagagcgagtatactgacgtacctgtgtacatcgcagatggcttaccggggaatagtgggagttggatgccgatccgtgatcttctagatgctgagaatctgctacgagccttagaacgagctattgacctcggttggtttaacaagtaatctatcaaatctaacaatttttaacaaggagagcacgatgaagattgatattcgagagccgtcccaaaaagttagcgagatagtgttcgggggaaagactgagtttgcaagctcgttaataaagggaagagatagttcctcggcctatattgtagctagaaacaaagagggcatcacatggcgccgcgtgtcaattagcgaccgcatggacgctgagaatcttctcgcagccttggagcacgcccttaatctcggttggtttgacaattaatctagtaaatttaaaataaaggaggaaatatgagcaattcccaagaccgcgtactagcccgagtggtgcgtatcgacgatgtgaagacccatcctaacgctgacagccttgatctggcgcttgttggaggttggcagtgcgtaatcaaacgcggggagtataaggctggcgatctggcaatctacattgaagtggactccatggtccctgtagacaaccctatctttgaattcctgcgtggccgtaatatggtcgaacaaggtggaaaagagtattctcgaatcaagaccatgaagcttcgcaaagagcttagccaaggactgatcgtacctgttcatgcagcgggcagtccagagccgaaagtagacgaagatgttaccgatcgaatgggcatcctgaagtatgtaaagccttccgagcaggtagctatcaacggaggcaacaagggcagccggactggcacttccaagctagggttccccaacttcatcccgaagacggatcaggctcgcgtacagaatattcagatggcttacgatcaggctcatcagaaggacgagaagtttgaagtgacattcaaattggacggttcgtctctcactatctggcacaaggacggagaagtaggcgtggcgtctcgaaatgtcggtttccgtctagaagacgagaagatcgggttcttcacggctgtcaagaacttctttaagggtcgtggctggaagcgtgtgattaagaaagactccaatcacttcactgcgatggcagaagagcttaatcttggtgaacgtctccgggagtttggtctaaatatcgcccttcagggtgaactggttgcaccgaatattcaaggcaacttcgagggagttgacaaaccggaatactatgtgtacgatatctacaacatttcggagagtcgttactatcttccagaagagcgactggccactctgggaatcctgaacgcgctagctgatgacggcgaagaggatgttaaacatgtgccggtgtacatgtgggacgtaggcgttccaaaagacatgcaagatgtaattgaaatggctagcggagagtctgcgttgaacggtaagtaccgggaaggtttggtgttcaaaagcatgagccgagactttagtttcaaggttattagcaacgagtatcttctgaaggaggagtgaaggagggtgaagatggactattgggcctgtgcagatgctgtcgaacgggctgggtgtgaatgctgtggaagcattctcccggtcgaagaaattgtaaatgacggcggcatgttggtatgctgtgattgctattttgaaatgttctgtgaggaggaagaagttaatgagtaaagttaaagaccatatcgaggaagctcttcgcccagctagtcgggagaatatcaacttgggagacttcgtactaactgaacgtccagatggggagaaagttccggcgtttgttgtagttatagaaacgccggagcaggaaaagcgagaaggctatgtgccactccttgtgtattttggcaatggtagggtgggatggaggtcgtggaaagaagtctacaagacttctctgagaatcgatccaaggcttattggtacgtgcgtctgggtcgagggggctgaagctattagtcagcttgaggaacagggtgtcttctcgtacattgatgaacaagagcttatcaaaaagtgctacgatgcttggatggagtggcctttcagtactgcaattgttgaagatcaagagccgacgttcggtgaactattcgaacgagagtccgtcttcgagtttgttagcggttttaacaaaatgatgactggtcttgaggttgttaaccgcaagtggaacaccgatctggtcacaggcgagccgattaaacgtgatgctctgcatatgctgatgctcgttaccactgaaattgcggaagctgctgaaggcgtccgtaaggatttgatggacgatcacttgccagagcggaagatggaagaggtggaactggccgacgctatcattcgcatcatggactatgcgaatgtacggggtttggatgttgcaggggctatcatcgagaagatcgagtacaacatgacccgttccgaccacaagcgagaggcacgtcttgcagaaggcggcaagaaggtgtaatggtgcaacgatatagaggtgtagtatgagcttgcagtatgtagttagaggggatcagcatattgacgatgatgccacatatcagttaagctatcccgacctcaaagccacgtatgaacgcctatcgaagctggatgattccagcttcaaggcttccatgccggaggtgctgcacttctgttgctttgtggcttggataaaagagattcctagctctgtgttactaggagaccgaggactgatacacttgatcgctcatcatatccatgaaggagcggaggacgatggcccacaggctttcaagtctttgaggcaccagttcaatacgctaatgaaactagattgaggaggcatagaatgaaactggaagacgttaagaaggggcaagttgtagaggtaagcgacttgtacaaccggccatctggaagtacattcgagcaacacaactcgcgctccaccggggttgtcgcaggcgttgacagatcagcgacctgcctgaacgtcaaggtgctgttccattacggggagctggactggggtaacgctgccgacatcgagcttatccattccgatccagaagataatgagcgtcgtaagaaaaaggtaaacaagattatctcgaaaattgacaagctgtttgacgaagtgtgggaagtaacctagcagtaacaaatagccccggtaagctttcgcttccggggcttaattactcttgtttttcttttattctccgctcaagttcgctaatcttccttttaagcgagtcgagttcttcatattgcaaacgggattgccgatcctgtgtgtacgaggccgagtttatctgatcctgtagtctgttcagtttgagttcataccgccgctcagattcgctaattcgaatctcgtaggtctggcgtacagagtcaaaccgagcctcgggagtcatcgctgtgaaagccagaatagccatacagacaaggagggagataaacaaagccccgactgctgaaactagcggccagtcttgtttccttgtcattatattgtctcccagtgtgggttaacgggttatagttattgagtttctgtatcccgacccttgacggcattcataatcaaaatcaaataccggttggtttcttgttgttctcttcttacgttactaatttcactttcaagtcggctattgaatctcgactctagtgcgttaagttttgcctcggataccatatctctttgcatcgcaaagatacgttcttcctgcttagaaagactggaacttaggaatccagaccaagccattaggatagcaattagcagagagataactccctgtgtagctaccttgattaggccttctttgccgtctttactttccatatagagccctctgctcttctgcccatagctttattgtttgtagttgactattgcacatggcagcactgttagtatttagaatgtaagctctagcgagccccttaactgtatcttgctccactcggtataccttaacctcctcggtcaggcttgccgggggcacaataaggatcgtttggtactgcggaacagaaagctctgtcgagcaagcttgtaagagcagggtccagactatccccagtagaaggctcagagatcgtctctgtggcattttcttgggtctcccttggggttgggttgggtagagactcaagctcacacaggtggccttgtagaagctcctgtcggctcttcatttgggctatatgtgcctctagtctcccagtggtgatctcacaccctgctcgctctttctggaactgctcttccatctgtcgagacgcagcttgaagagattggatatcattcttcgcaacagctaagtcgccgtacaaagagaacgacagatatccaaaccctgctgccattgcggcagctactacgagggcgtagtttttgagtttagttagtatcattttctattgagccatcttctatggtttccgaaatcgcttcctccactttaccagcagttacaaacactgccgaaattcttacaccgacagctaccagtgtggccactgcggcgaatacgccgggaggaaggataggctcccaaagatgaaccatggcctccagagccataaaagttgcagagcctacagcagcccagaacttccagcttttcaatagcttcttcattaggaaccttcctagatttacttgaaggatttgtaggcttctgctagcttaacatcgtaattatttttcttgtaatcaggcccgttatacctccgggcaaattccgcccagttcttggatttcagagctttgtggattgcaggattgatcttgatgaagcgtacaaaagtgtttagttgcgatccttcgctggcgtactgggcattgacaaatgcctgaacactcgcataacctagtgcctcccaatggaatcccataatctggaataggccccaagaggcactttgaagtgcgcagtctctatccattttgactgctttatctagacgttcgtgctccgcttgtccgccgaggtatcctccagctttagggttgcaaacgtcgtttatttcagggtcatgacctagcttccttttgagaagcttgaacatccagtgcctttcgaatagaatcttagggacgccagaaagtagaaagccgctcccacgactctctactttagtgacggcctttacactggcaacatcgactccgagatcatcggcagccgattggaagtcttgctcagttagagccatttttgatactcctgaattacagggtggaagtgatagcaaaccagttgaacgggtaagaccagttgccccagttgcagctaactctaaacccggtgttgctccacatatccgtcatgaaagcgcccgggccgatggagttgttaaacgtccccattacggtcacttgaacgttcaagattcgtgctggaacagggagttggatattcgtccttgtgtcatcagacagaccgggaccagttccccattgtagcagaaggccgtttggtagtcgagcccatcctctggaaatatccgactgactggactggaagtccatagcagttgtattcgcaggaagaccccatacatcgagcgtagccgctcccttcaaccctaggttgtttctagctgcttggacgttcgtgaggtcggacaggttagccccagacgacaggaagtctcctgtatttctagtagaagctgtgcctagccctaggttggaccgagcggtagcagtgttagccaatccagcaaggttgtctgccttcatcataaccgccgcagggtctgttgtagccatcccagtgaggcctaggttgactctagcttgtgccttgttaggtacatctgctaggttctgagcgctcctcaagaaataggtttccggctgggtagcactacttgtaattccaagattcgatcttgccagcgccttgttaggcacatctgccagattgctacctgccttcaggaatgtagaagaaggcatagtcgctgtatccgacagtcctagattagctcttgcggcagtgacgttagacagaccggaaaggttgtctttcttcttcagatacacctgtgcggccttgagcggactcacagccttggtatcattggctccagcttctgtctcgatagtcgtagcaactgccataaccccggctacagtctcggtagcaggaggaacgagagtcgatagctggctcagcgggatcgcgtgagttggctgtgtggcagtggcgacgctgaaaacattagagccgttcccgtgcttcatagcgtaccgggcgtcgccttcagctttactatacacacttaggttttgtcttgcaataactacgttgccaatcccagagagggtgttgtagtttgttacatgccgatcaaggttggcttgaaccttagctgcctctcccgcatcctcaaacgccactcgccaatatccggctgtaatgttcagagggtcagttggaatcttgtcggaatgggttctaaggcacttatagatgatcccgttagcgccttgagtgtagctcaggttaccctgatactctgtgacgctatcccattcgggaataccgtgctggttaacgtgcgcgttgaacaagtcttgcttgtattcaatgaagttggcagtttggtagggaggtagttctgtcacccatccaagcccaacttttacagcacccgggtcaaccttctggccgttttcagaccagatagcgttaatacccgtaggcttcataatgtttggcatatattacctcgccttattctttaggagctttaggtttgctcttttcggatgggaagttcttgtgctctggccatttacgtagtgcagaacgatacttacgccaagccttctctcttacttcgtcttcatcgtcgatagcaatctctacttgacggtcagcccgggttagctcgttgtctctccacaatctggcttcaaagtcatcatatttgtcctctttttctaccacttccatagagccatcttcaatcgctgcggcgatcttcacgtacatggagtgagacgtagggcatccctctacagcgccgtaaggaatccatcccaattctggatggtttatttcgcactcgaaccccgctttaatttttacaacgtttctgaattccattaaaatcacctccagttataaaggcccttacgggcctattttgttaatctgcaaccttctggaacaaggtaatctggttagaacctccggctccgaacctacccatgcacctgtagctaccggatagcgtagttccgtggtagttgacgggagacgaagaccttagagacgtaccagctactacagtcccaacatccccacttccgctagctgcaatcgcaaagacatatgttcccacagcctgagcactacctctagaagtggcagccaagatttgggcatcagtcattacgtcagtttttctggcgtatacagagtctacccagttggtaagagtcccataagagccgaaagctccgccagtaaggttgccgttgctgctcataaaagcatcgccgcagtacacacggccagcagcctgcacgttcccggcagcaatcacgctgttgccagagttgacgttgccagacgaattgagtgtcgcagcattcaccctgccaactacagtcaagtcctgaccagccagagacatgcctgtcgcaccgcctgcggtcctgaagttcagagagttggcagacgggattccccaaataagccctacctctgctccatcattcctctggaatactaggtgagcgttaccagtgctggctcttactctaatatagtctgttcccagaacagcgccaaacgctgtaacgccttgtactgcgatatctcctgttccgctcctcacaacaatctgattagtcagattggaggcggatgccggaattgtcgcggagttggccaatcctgtaatttgtgcaacagggactgttccgtagtcgagctggcctagtctagaaaaacgccatagaggggtgttagtcgttgcgtcccagataccggaaacaccgttatcttgcaaccagaagtacctgctcttatctgcgttgtacaggacagtttgagacgtgttctgtgccagtctgtcaaccaagagccgctctctggcttgcgtttgagtagctcctagtccatactggtttcccgcgtggaacacaacattagagttaacccgcagagtggcgttagccgcttctggccctctaaattgaaataccaacgagctgtcatcaggagccaccaagctaatccaatctgtatcagatttatttctaagagccaactgggtagtcttatctgttccggtcatgttagctccattaatatggagcctcgctacaaccccggcgtagcttgtatctaggcccggcagaacaatgttctggcttccgtcgaacgctacgccgttaatcgtaactggagccctgagcttgctggctgtagtcgcgttaccagaaagagtggctgtaatcacaccagcgttgaagttaccagcagcgtctctatagaccagagtgtgtgctctgttggctggatcagccgtgatagtagcagagttagctaggcctaggaaggttcttgcgttagttgcatcacccgcgttgactaggcctcttccgaacgctgtaatgttgaaggtagccatcgaggtgtcggtgttgaagtacggaaccgcgttggcagccctagtcacagtagacaggttagacaggacaacagaactctcttgagccgaaatgtagtctctagctcccgctgcgttggctacgttcagcatgccacgtccataagccgtagagtcaaacacacctgcaccagatgcgctaatgaagaaaggaatccctccttctctcggagtcaggcttccaagtgcagagctagctgtggtaaagtctgcgaaagctcggacccagttagaactaacggtggccgggtcgctacctgtatgggtacggacagccttgtagacgaaaccgtttcttgtgcagaacgatttgtttgcaatatactcttgagtgctagtccactctgggatgcccttctgtagcaaatacgctaggttagtatcgtgaaggttccacttccagttccaccattggcgaggaaccgactgaataccccatccgccttgctgctgcgcaggggtcggggctaccatatccccgcctgtggaccaaatattttcaataggtagttgaccgatatcagccatttataactccttatgtcactaggttggtcagaattccaccaacagtgggatcgtttaggtctccaacgccttgtcctccggggaagccttctgtagcaaatacccggccagcttggaactcagtgtatgtgtagttaaccccgatagtcttaggaagcaatgcacctgcaccacctaggtcgaatagaagactacgctctacgttcgttagaatcttaccgatgccgatacggacagcagcgggagcgtactcctctaggaatacttcaggaaccccgaatacaaatttataagcttcgataacttgctctggggttgagtttgttctgttcttgatgatctttgctttcaggatcatccgatactcttcatcgctcggctctctggcgttaccagttggagcaccgaccgagtaccatggagcaccgaccgtagggtccgacaggcttccgaaagaacctgcacgctccgttccagcgaatccaaaatagttgaaaatatcttggtacactagaccgcgtggtcgccctacaatgtctccgataatgtccagttgcttcccggtggctgtgtccagagaccggagagtctggaggtcttccagtgcattctggatatcaaacttaccagacaatagcacttgcaggaagcgatcaaagatcggcttctctttaaactgttcagtgacccgttcccgggccacctccagataatcttctctgtcaaattggttgacagccatggaattctccttctatcattacaccgtagttacggtgatatctgctgcggcgaatgtagccacttctttgaacccgatttcgatgttcgccataccttgagtttgtcctttcttagcaatcgtcaggctgttcacttggaagcccgggatttccatgattggggcatagaatctagaataaattacgtcgtctccgatcttgtaattctcagttccgtacgctacaatccttggccgtaggatatcttcaatgttctctggcatcgatcctgtgtttgttacactgatcttgatctcgattggaacctcaacagggcgttggtagttgactctatgggtatagcccagactgtctaccacctgaacctctgtatctccaacagagccaatcccgaatggcttgttcagccagatagactgtgcaacctctgtaggaataccaccaagaacgattggaaggaacgagtgacccgggactccgtgaacggggtctaggttgtcggtatcgttttcaataatcctaacatcctctaccccttctacgttcatcagaccgtcgattagggactccagaatgttggtggcttgtacgaatttagagtttcggaatctctcgcgaagctcatcgtcggtctcgcgcagacggccagtgatagctggaacagggttgataacgctgtcccatccggcaataggaatggagatcgtatcgatagctagagcttgctgaggcacagggccaataacgtcgtcaacagcgataccaagctttctaaccttctgaatactcaggttggaggcttcttcgaaagtcttggtgttgaatgggtcaataggtactatgaaaagtataccattctgttcgtagcttgtcaaggtatttccgtgatttgtagctacgtctgcggccagtcctgctaggatggactcggatgttactgtaccagtggtagggcttgtgtacttgatagacgttgtgttaatgtcatcaacgtacatcttaagctcgtatgtcaggtcgttgcctactgtctgagggaagattccaacaccagagcaagctttaggagtgaggatcacgccttgtagcaggtggaacactcggcctgtactgctggaaatcatcttagcgggaggcgagttaataacggtgttgatgttgccctctagaacaacctgagcccgggtcggacgggcagcatgccggctaattgccgagaaggacactaggttgtccagagccacgccagttgcggctgccgggttgaaggagttatacaccatctggataacttcccagatagcttcgtccgatggagcaactacgccgatcagacggcctagagcagagttaccagacgtgtcaacttcgtctccagttgaaactaggtcggcgaagacctgagaggctacgtttctgtagtctgtcaggatttggtccaagtctttaatcgttagaccttctgctgtaattccagccatattaaactcctatcattctgaaagtgatgggaagggattctgtattgtctgtggttctgactgtgaactccatggagtattcacgtgtgtgagggtcgatccccgactgccaagatgtaatctcaaggacgccggggtctctcataatctcagattggaatatcgcgtcaacagcgggaaggctcctagacttaccaagaatcctctcgaagtaggggatgccgatcctatcatccaagaaccactcacctaggaatgtgtacagtttgatctttagtcgctgagcaacaatatcaaccattcgttgagtgactggagcttcaccatttataaaaaccaagtcatgtgtgtcggggttgacaaacaagtccatatgatctcctttaagcttgtgggacagcagtaacaccgccgcccggcataacaccaccgtgtttgtgagtgtggaatggaataccgttgaatgtagaagttccaccagtctgcacgtagttacctgtatgtgcaatgttcccgttccatgttgtatgggctgcatcgacagtgagtgaagcacacttgacgttgacattttgagcattaatgcttatagtcttgcggctgttgattagaatatctccattagctttgatcctaacttccgcctcttgtcccgtcatcaggttgtgggcaatagtaaggtctttggtatcatgtggccaactatgtcttgcagggtcgttcatcgacctagggaaggtgaacagcccgggaatggcaatggcatccgccatgttgaacttacgaagatcgtttggagtgtgaggctgtccagtggcagagcctttaaacacgtccatagttctttgagagaatacacacaacaccgtatccccaacattcaatgggaagctgataagtgtgttagctgttcccggcataatgacagggacagatagaatctctggttgctcttccgatgtgccgtctttgtacaggtcgttgaccactggtctaacatcaacagataggcgtctaaaatcgtccagaacgcgcaataccacacaaggtatggcagtgtactgcttcgaaccttctgtggacgagtgcaggttcagaagctcttgtaggcctgttctcctcattggtcaatatcctcttggttaagatcggaacaccagcattcagtgtaccattcgttgtctctgtatccgcccgagattcggacgttgttgattctgaaagtgcctgacaatctgtccgactctacccggacaagaaccccgggagttagctcagggttgagaaggcatttgaattgaacgcccctccgtctccgctggtctttcttctgtgctgttccgctggcactggcgtagaatgggatatcaatcaggccggtctctctgtttacgagaggagccatttgaacactcttcgttgttgggccgttaacgtctgtgacgtttagaacgtttccactgatgttccattcaatattgttggcttcacacacactgtttagtgcgtctttagccagtccacgtagttggtatccatacatgatcgggttgttgcaattgaggcctgtataagctcctctgtccactcccggcatttgaagacgaatttcttcgataacatcctttacagttttgcccggagatactgtgcccttcagcttggtctctgttagtgctgtatatccttcacctagaataagctgagtgacataatcgttaccactctttctagtcgaagtttcaaccacgttgccatcaagcacaacagaagttcccatttccttataaccaacttctagtcggcacgtcagatactcagtttcaagaatgttcagagtggcaatagacagattgtatatctcaacagtcgccgagtttccgctcttcttgttatctgaacttttagagatatcaaaccggaactgaagtccctctctgttcaaacttccgtcagggtggaggtttgtaatctctacaccttgcccggattcagtgttaccgagcgttagtttatacactctgtcatattgtttcactctacgtcatcctccaagtcaacgttcacgtatagcagttcgaaaaactgtggtacaatgtcacttgcatcgtgcttatactgtacctgttctaggttgacaggcatcagtaggaagtagccattgaaacctatatgttgcatggcgtagtctgccatgatcggatactgaggaacaaccgccagtcctgtcaggatagggttaagttcctcgtcgaatatatccatgtgccactgccgagagcggctattccagtagaattgaaggactcttgagattccctcgatagctactgcgtatctgtacttccggtcttggtagagaggaagtgtgtcgatataagtcgtgctcatttagtctacctcgcaacctgagttctaatctgagcctctttcatttgactacgcttgaatgtaggagagtcttggctggtagcattgctagcctcggtatcaccttctttggtgtctctcttttctttcttagcggtctttctacccttgttaaccctaacctcgatataacgagtgtctgtgaatgtcacagcctcgattgtcatacgaggttgaaggctgctacctgtctcggcgttttcagtgaaagacaagtcggtgaagatgcatctttcgatttgatcccagatgataccgtctcggaagtccagcaaactgaagacctcagcattacgctgcatgtcgatcagttggcgctcaatatcataagcgactttatcacccttttgagggaggacagttgcagaaggaatctcaggaggaataaactgagtaataacttccgggaagattcggctcggatcaaatctagaagttgtgataacagccggcacactgaccggctgagtattcacgaactctttattgttgatcttgtatgtctgggcctcgttgtcgttgataacgggcctgttcaagttgaagtctgcgtctgatacgatggctgtaagagtgaagactgggttttctgtagtaatgtggtctgtgatttttcctcccgtttcgattgggttggaactcacagagccacggtactgtcttccgaactctgtaacagcgtcgaaccagattaggtctccgttctctcttttgatagcaattgtcattgggattccttataacttgccgaagctctggagatttcttcctcaagaacgttactaacgatctctcgtactcgctcttgcgcttcagttgtcatgacgttaccctgagcatcgataccagaaacattgaggttgaaactaatgtcaatggcactcttcttgagggcaccctccatttcgtttctaacttgaccacgttgcatcatatacccaaactggtctggagtcaaggactgggttgcacgggtatgagtctctgtctggatcgcgtcaatgttctgagctactagcctgtcaccgatgaaggtggccttgtcttttgcatcttccggattgaacatagcgtacatcgtgtcgatgttcgacattatagtacttctgtctcctccggcttcagcaatcttagcgtccctgtacttgccggctattgcgaatctctctacaacactgttgaagaactccatgatggcagcaagttctctcatcgtgctgaccagcatttcattgaactctagacctttgagcgcttcagctagccccgggacaacagagaagataccgtcgagattgttcttcagttcactggattcactggctagcttttcgaatgtctcggcagcttgtacgttgttgttcaagaagtccccgaacaccgaatcaccgccttccaagaagacaatgaagtcttccagtgccaacgcaccccagctaatagcagagatcaacctgcccataggggtcagcaaggctagggtttgagccgtggtaagagtcagccctgtgccggtcatgttgaactgcttggcaatgttctcccactgggaaccaagctcccctccaataccgaccagagcgttgacaggcctcataagagcttcgaacccgccaccaagtgcagttaccagaggaagcgcttctttcatgccttgggcagcaatcttgaagaagtcgctcattcctcggtcgaatcctccagccgcgaaggcctcgatagtgcggttccatccgaactggaatcggccctgctgagcggctgtaccttgcatagccgcgtccagagcgccacctttacgagcttcttccgctagagttctggcgaatgggatcagagcatcactcttaagctcccctttctccatggttttcattagctctgcgatagtcatgtcttgagacttagccatcagagctacagcagcggggaatctttcggccaactgacctttcaattcttcggacatgatctgtcctttacccatcatctgctctacggcacggaaggagcctttcatagcctccccgtccagacccatcactcgtccatattcagccatggattggaagataccatcaacctgtgttttgtcgaagttggatgcttgtccggcagccatcatcttaacataggagctacctattgctctatcgtcaagaccgagacgctgagagatatcgcggagggtggcttgtagctcttgaccaccctgtactccaccaccgacagcttgcatggccagacgttgaccttgcagttcttggttagcacggttaagctgcataatagcgaacgcaccaccaaggccgggaataaacccgcgtccccacccggctagctcgctaccaatccccattcccataccttgacggatatggccggcagtacctctcgatccacctgcaccacctcctcggatggaagactctaggtcaatgcggattctcacttcgcgtctgatttgctcaagaacatcttgaatctctctacgaagatgggcacggtctacagacagcctaatttgaggcgtagcgacagcaagaccgtttagcctaccctgcacatcccttagtgtgtttcgtgcattctggagcaatttagagcggctaatgtctgcattcagatgaattttaaaacgactctctgtgcgcttcttccattcatacagcgtacggctagcctgagccaagcccagttcaaccggtagatcgaccttggtctggccgagagccgtctttacgaagtttttctgatctcggataccgctaaggtctagcctaacagacttcaacctgatcggcgttgcattcagtctttcttgaagcttctcagagataagacgaacagcggcagcatctaccgcgatgttcttcaagactaccctttgagtggctgccttggcaagctcctctctcagagtttttgtatctagagttagcttaactccaaaccgcttgttcgtcagcttggagaattctcttagccgggcttcgaccccagcgagcttcttgtcaaaagcagtgagaggccgggaatcgactgtaaatttaagttccccagttagctgggcaatcctttctgtaatcatttcttatcagcctctgcgtgttcttttgccacttgagtgatagtatcgtgaacgtctataacctcaaggatgttgtacaaatcttctgtagtgaggactgtactcagttccccatacgtcgttagcttgagagggtgagtgatagccacataaatctcccaatgctgcgagaacttctggtgggcctccctaaccctccgatcactctgaactcgatcagtagtgactgaagtctcggactgcccatccccggtctttataccgtcggtgcctctgcgaaaccgattagagaaaaaaccgagccgaagttgaactcgatcacgtcttttgtgagtgcgtacagcaggtcatacttgccagcgaattcggtgtcgaaattgattgccatcgaacctttgaaaactgtcagcatcagattctggatcaaattctcaacaggaaccttgtcgatgttatcgaacagttctttcatggctccagagaagtcgtggtcagcttgatacttggcaagggatggacccagcaagctggttagctgcttcagtacgctgataccgcgagttgctggcagaaggttgatagtgtattctgtcccattgtggatgacagtacgttggtttccgaacataaatactccttatttatctgaggtagctaagagcgccttgaacagttccaaacacgtcgaagccgacttgctggtttccgcctaccgtgccatcggtccagtccagaacatcaatagtccagaccctgttctcgattccatcggtgaatgttatgctagggtagccattgacataagcgttgtctgtgctcatcatggtgctaccgtgggtatccttgacagacaaggtgattcgggcggattgtgttcttcggtcttgctctactagcgagaagaatgcatcattagacaccgaagtctgaagaacctcgattctaatctgcgcagaaaggtctctattgaagacccgggtgtggtgccctctgattcctcgaaccattgtgtagggtctcgaaagccaagacatttcgaaagaaactacaccagtgagagcatacccacaaaggacaattttaacatcagatgggctatatgtcaataccgtgttagccattagaagcctccgaattgcgtaagggctggcagaagagagcttcccagcaggatagcttgctcgaccaaactttgatcgacgtttccgccaatgttcatggcgacctcagagcaccctagaatccaagtgcgggtctccagttgtccagagaaagataccctaggtaggtcttccacccatgctgtcagagctaggaagcttgtagaacccttcgtgtccttaatcatcagtgggaattttcccattcgggttgcaatgtccacgttgtaaagcatcgaaaggatatcattggtcggcgaggattgcatgattgtcaactctactcgccagccttggtctttgttgtagacccttgcgatttcaccatccatcgaaccgtgcttgatgaaaggcttaatatcttttacaattctgataaactctccctctgcgtaccctgtcacggaatggataccagcgagagttacaaccacgtcacgcggcgagtaggtggtaatcaatttctatcctccagaaacaacaaagggagccacccgttaaggcagctccccgtcgatgtggcataagcgctatattacagccagcgctggtctagtgtgacacctaggttacgaagagtatccgcatcacccgggctcagcttggcgttaccgccgattagagtttgcaggttgtgtgcatgaataacccaatcgcgtgtctgcatgctgttcgagaagttagaacccggaacaacaccgacataggcgtcatcactgaagtagtcggaacgaccagagttgtctttaacgtggattgtgaacaatccctcagacgaacgacgggcgtcgtcgtagttgtaaagagcagtcaggaagtcgttcgaaggcgaagtttgttgaaggctaacagtgagggtagcagacttagaggcgttgtagacgcgagtcgatgtgttgtcggctccggtatacatcacgtaagtgtcagcgtttctttcaatgttaacgatactgtcttcgctgaatccgccgagaaccatgctctcaccagttgcagggtgagtaataacaatggtaacatcagccggagagaatgtcgctagacgttgaacagccatttagtaatctccttatgggaaggaccgtccttagacggtcacagttccacgaatgtgaacgaagtgaatggcaccggccagacgggcttcaaattcaatgccttcaaagatacgctgtgctctcatgttcggagacatggatagaacatcaggtacgaagactttaggagccggagcttcagccagaccaccaacacgaattccttcgttaagctgggctctgatttccgattccagaattgttgcaccaacggcgtcgtaagggattttcttggagttagccatacggaaccacagacgctcggtcatgcgggcttccagccagtccacgaaaatcattacgtcgatccattcaccaccggccatagcgccaccgaatgtacggttgacaccaccaacgcgctcgaacgtggtaacgttcttgttcttcaggttggtagactcggttggagtcagacggtaggcgtctacagcggccagagctttatgggtccatgtgttgctacccggttgctcttgcagttggtaccctacccaagcacactcagggaattgagcgtcagcgtttggatggtaaattagagccgtacgttggaaccctccagcgactagacgcgaagcaatgtcgttgtctgcggaagttttggtattagcctgagcagtagccccgacaaacactttcttggtcccttcgatatgagtagctactgccatgatatcatcgtcagcgtggctgtcaatgctcagtgcataccattcgtcgttttctccctgaacagcagtgatagttgccggccagccttcagtagaaggagcagcggccattgtcaggttagaagaaactttcaggctccagtcttcgttagaagcgacggttagagttccgtcttcgttgtctgtgacggttacgccggctaccggagttacgtcataagctgcctttaggcctgtggcaatcagagtagcagtgtcgtcttgctggctgacgtagctgactggtagtccgttgacggtcagaacgtagctctggccttcctgaacaacactgacagatacggtagcagaaggaacttgtctacgaccgataactaggctgcgtggcttgagagcttgaccgaagtagcgaacagcggcaagatatgttggatcggattctccgaagtcttcagcgacacctttcaggctgttgtagactctggcacgttccgagaagtttgtgtgagaagcgatgaacagaggaacgttgaagtttgtctgtgcgacagcagcagtctcacggctgatctgaatgtcaattacatcagtaagaacagtcattcctgtctcctattagtgttcgaagtttatgtcgatgtgggactcaataatgtgacccgggcgaccagcgtcgtaataaacgccgtgaatatcagccccagcagcaaactcttgagttgtggtttctatcacagagaatccaaattcacatgtaacttgatagaacatgtacatatctgtttctcttagcataggaactcgtcttgtgctagggagtttgaaaagggatagattaaactttctttgggcggcgtgtcctgctggagtacgcattgcccgagtaatcgccattgccatgtcagagacacttgctgtctctccatacttgccaactagttcgaatacgaccttggctgcgaagtcctgttgaacttgaacagttccatgcgaaggactaatgggatcgctcatgttggagacattttcccttcccagttcatctagcttcttaatatcgatagccagataaggggtttgcggttcctgattatttgtgtatgcttggatgacacgccaatcagggaacaactcttttatcataagatagagagagttttctagctctgtatggatcatgctgtactattcctctctactctcatacaaattgctttgtaatggtttaggattcccatcgaatagttgatgactttcataacttcatacaactctccttcccacatgaatctatcggcactccaccctcccggtccttcctttaactggcgaatctcttcgcctctggagtacaccttgaagcaagccttgcttctgtcggcctctggaaggatacgagtgtctgtcgatttttcgataggttgaacgttagctgtgattgtcactactgtctcaactggaggggtaggtcttccaaaaccgtcgtctccgggctgccctcttctaatcaaatctagcttgacaaagttggtcatggagaaggtaggatagagcattattgcctccgatggatttggaacttgacagactcaagcatcttgccagtatggaacaacggatcgttgaaccctttgtaagctgcccatgcgggactgttagagcccgggtagtcgtcaatgttaacttgcatctgctctgcaaccattctgcccagcttcttcaggagagtattaacctgtcttccatcgcggataacgttttcaaacgtagacttcattagtcttgcgtagtggaattgagatgtgaattcttcaaaggttggagccatgaatggccgggttgggttgcgagtagtaccgaattcgttgtaagctgcaacttgtgcaactggtaggtttccattttcagaaccatatcggtcctcggggaagaaaccaacttctaccgttgttccgtctagagcctccaccctcttaatcaaggatgtgaggcgacggcgatctgttttaaaactgaagcttgccaagataatcacacccaatgctaaggtcttgaggaccggggttgcactggttgtaaagcttctcccgtcttgcaaaaccgatgtagaattcccgtgttacgttgtcggggtctaggtcattagccagcatatccgatttggagataccgccagcatatggcacggccaaagaaattgtaatattcgggtctttgagaatgagctgaagagctttcaagtagttgttgaaatactcagcaccatatacttcgatatcacctgtgcgttctctcattccccttgtcaggcggaagagcatcatacgcataagttcaagtgcggctcgtctttcgttgccttcgttcttgtccaacacccattgataggtttcgtcggaaagcatcggaggctcccacacgtcccctacaatctctcgtagacggtcgatagggttgtttgctggatcaccagtgtaagccatttttggtaccctcctacgacgaaagggaggccgaagcctccctgaagtctttacgcattcacagtgccgcgaacgatcatctgtggacgacgcagaacgtggatgaagttggactcggtttcgatcaggatcgaacgacggtcttcagccatacgctcggtagcgtacagttctttacccagagttcctaggtcatcgaaagtgctgcccgggccgaagtaacgagcgaacaggtcaccgctgtcggttgggatgaagtaagcatcgccagccgggatcagacggttgccgtacgggtcaacgccacggtattcgatgaagtgaatgtttccgaagtagaactcacggaagcgaaggtccagaccgcgagcggttagacgttcacgccagtattgaggactagcttggtaagctttgtagaactctttgatgctcggatggttaatcagggcagtgaagaactcaggagagcacagggcaacgaagtcaccacggatcagaccgtcttggctgttgtcttgcatatggacgaagatttcttcggtcttgcccataacgtcagcggtagggttggtcaggtcgaagccgacaaccttacgagttttacccatcaggtcgtaccagtcgtactcgatggttccggctggggcgtagctcttacctgttacgatagcgctaacggaagcaacttcagcggtgttagcccagttgcgacggatggtttccagcttacgagcacgaacctcgttcagagtttcttcgcggtcagcaccgaaagcgcgcttgccttgaatgtcttctggagtgatgtagtcgtcttggttgaagtgcggaatcgcgaaggcacgcagttgacgacgttggtcgctagcaacttggtgacgagttccacggatggcatccttaaccagaccgtagcgagtttcgatctcttcgaactggacagtgttctgagtcacaccttcacttgtgaagacgcccatgttctcgacgagggtccaagtgttcgggatgataagcaggttttcagtctggtcggcaatgtagaactgaccatcgtttaggtaggaacgggtgttagccatttttaaagttactcctagtatttatttactggaacgaccctcgcttacgcgaaggtaacgttctcgaatgcgccttcgatctggtcaacggcgaagatgttcttggctttgaaagcttcaaagacggtagctttatcagcgtcgtcaacgtcagcaccgaagataacagccttggagccgatcttggcaaaaccgcgagcaaggacgacagcgtggctcatctgagcgttggcatagtcgtgcaggtcggtaattaggatgtaggtagcgtcggcgatagtagccttagttaccagcttgccagtgctgtctaggacagaaccagttgttttaacatcaatgtcagcgacaggcagagtttcgcgagtgtagaacaggccacggtggcccatttgttcttctttcagccagttgctaagacgctgatgatcttttgcgataatgttttgagccatttggaattcctctagattggctagatattacttggagccgtggcgagctttcaggatagcggcaacaccggcgacaacagagtcgtcttcttccccagcgcccgatacacctttctcgacaagcatgtcattttggtcagcagcagctttaagaatgcggagcgttcctactgtttgtgcaaaagcttgatcgtccagaacttccagagacttgaaagtatcttctacttggtcagccgggaggacttcagccagttgctctttacgggctttagcgatagcagcggttttctctgcctcagcagccttgacaatttcacgaagagctgtaagctctacattagcggcgtctagttgcttctgaacttctgcaacagcagcgacaccagcagctttttcaactgcaatagcgtcagctagagcttctaggtgggccgatttcaggatagtttccatgttggtaatctccttggatggattttcattggattgctcggagactacctccagagccttttcaagcagttcctgatcctgtttaagggaaagggtctgctcaggggtaagctcggagagagcttgattcaggtcagccgatttataaaccgacttaagaatggacatagactcgacccgctggtcgatccagtctttgtgatctagttctggatactccgttctgccatatcccatggcaacagagagaacttcggcatcttcataatacatcccgaagaacttacgaaggaactcagggaactgcattgtgactgtaacttcagcagctttatcgataagctcttcagttacgccattggtagcttttgtgattagagtagtgtgcccgttggctgcaccaccttggagcttactgaccagagcgacatgagcaccttcgtgttcaaacttgatatcggtcagtttacgttttgcttttacggtcattcgatatcctcgactgtagctctggcaccgatagagacgcctgtgaattcaccagatttaacgccttcccatagtgcatcggctacttcagagccttcagggaagtgccaccactggagccatgtacctttcttgatctctcttccgtcgtcagttgtgaatgcggatggagcgatgaaggactggacaatctcagcttcctgtgtttcaatcttgtggaagatattagctacgttgcaatgcgtattgaagttgatgcaagctttctctacttcctcttcggagtaggtgtctgcgtgtaggtcagtcgtggagtcgccttcttggggctcaagaacgacaaacaaagccatcctcttttcattgtctagggactttgtgacctctacagccggggcttcttccgccttggcgggagccccgaaagcattgctgagagcttcaataacactttcaagagtcagcattctgtctccttatgcgttatttgcagcggcgttgtctctaccggctgcggatgttgatgcaccattacctactccagctttacctgcttgagactgaccacccatgatattatccacatcaacaggctcgtcgtctggtcgaggcttaatcttgagagctttgcgaatcttgttgtaaacctcacggtcacgttcaagaccaccgacagaaccgattctctgaatccctttcgagaactcttcaagatcgatttcatctagctcaccgtattgcagcttcggcaagtctggactataatcaccgttcagtgcgaacagcgtaggaatgagtttattatctagtacgtctttgatttcgcggagccgcgattcaatcgccatagccatgatgttagtcttggcaccagctagagagtaagagccaacttggtcctgacccatcttcagcatatcggcaaacaaggcttgcagaattttgttgtcccagcgacgaatgatggcatctgtatcatacatcttactgccctgcgaagaggtcagttcgaatttgaacagaggttgtcggctttctgggtcaaacgcttgaggaaggataagtccagattgttcattcatttgaatgttacgaattactcgcttgtagtattcgtagactgccctctcagcttctgtagcatcttcggacatatatcgaggaggcagatagagcgtaggcataccgttcatatcgcgtgttacgccaacggactcttgctcttcaatctctactcgatatctccaagcgttatagcacgcacggagaggactgttaccttcaggactgtcacgtttagcatcgacccggaaaagaagcatcttcttagctggaatctctacagttccgtccttgttgcctaggttgacgtagcggtcgccattaacaacattggcaaggctttgctcacaccctaggaagtttctcccatcttcagaatacaaccacttggtgatagtagactgagagcggattggcaactttttaataccgaatttgttgtcattgtacttcgatacagggtatccttcacgtcgcttaaacaccatttcatgtacggagaatccgtaggtgtagaagctagtgacctctttgatgaaggagtaccaactgtgttccatgtcatgcatgcactctttcaggaacttaccccgggccttcatagcctcgtcggggtcaactcctagatcaacttcccagtcaaccctgctcatcatcatttcgaagagatcgagtgctgatttgatggtagggtcttccgccatcatttggaatgttctgcatgccctagggaaccgaagttctggtcggcgttcttccagaatagtaccattgacttgtttaaggcctgtactaccaatctcgcctaggcgaagtcgcgggatacccggtgctgttttttcagtctcggccatcgccgcctcctattaatttagtttgaatttgttggattgagtcatatcaggcggtaggaaatcagggataatcaagctgccaagggatagagcattaaatgcatctgatgtagcgtcaacttggtcatctttgatagccttacttccgtcgaatcgctcaagttcatcgaagtaatcttcgttccaatctcccgcaacgacttgcactgatttagtttcagctacagatacgaacggggcgaatcgagtaactttcgatttgttagttgtcttcggtctggcgtggaatccatgatccgctagatctctaattagctgggcagcataagctttaccagcagcccccgggtcacatgggatttgaatttcaacgtcttgaccgtcttgcttggctgtttctagaatgaggtcgaaaacacctccgaacaacctacgctctctgacaacatcctcgacagtgaacaagccttcttttgtacggctcatcagcacgccggctgtccagtcggggtttctgttggtttcggattcgatgctaccgctgatgtcccatgcacgtacccttttaagcacccgtagaggcgggtggggaacgatttggcaccagtcccttgtgaagtatccagctccctcttctctagcgtgccagctaccgtctaggagcttttcacgttctaccctaggaagggcttcaaggttagctacatactcagggtcgttgagcatcaagattgggttatcgaaacagttagccgcgatgaatttgaagctgataggcttcacctgatcttcatcgtcaggcgctagactgggattaccatgaagggcaatgcactcttccttggtgtctccccagaacatcttaccgcctttgcgtacaaaccagcgagttacgccggagcgctcagggatcgggattcctgtgtcagggtctagccaccattcaatccatttacgaaggaacgaattgtaatcagggttacatgtaatcttcatgtgcggaacaaccgagcatttcgggttacgcatacgagagataaggtatgtcaccatgccttctgtgaactgctgaccttcgtcgactaggaacttactaacctcccaaccttggaaggagtctttgtcagattcttgttcgaagtgtcgaaggaaaataactgcaccagaagagaacacaaacttgccgtctttgtctttccacttgactttagggtcaacgagcttgaataggtctgttgctttttcaagcagaccgcccgggcctttaatctgaggagtagtacgacgagtcattacacctcggaagttaggatcatggatatatttcatgaagtccattacaccgagataagacttaccagcaccagcagcaccaccgaatacagtgatctttgcatcgctgtctgtgaactctttctgtttgaaagattttggaccaataacatgagggctgagatcgaaattctctctggcctctttaagcgctagcgcgattggtccgagttttttatcaggaaccttagtgttttccatgctacaaccttatagagtgtgaaccctatcgggagcttgcgggttctttgatagtgaattggtgccccattcctgacttgaacagaattcgccgggttacaaagccggtgcatcaccataaatgcttaaagggcagggaatagagcctgtgagacgggaaaggaggaggaaaccgttcagcacaggcgaggaggaaagagtgtcatgttgtggaatcgaaccacctatcgctctgctgcgagagcccgctattctcgctttactggcttacgatccagagagcctaaaagcgtcaacgcgatataccattgcacgacattggttggaggcggggactcgaaccccaacaatcgggtcacaaccgaaaggcagcatccgggctacacaatctccacacgaataatgccaagccggctgaaagcacatacggaggaatgttccggcttggacttgattggagcagttaccggggatcgaacccggaacaccagattgaaagtctggcgatttatccatttaatctataactgcattgtttggtgcgcccgcttggtaacgatccaagtcctccggaatttcaacccggtgcttctacctagttagcttcagacgcgtatacgtagaactcacatcttctcccgggcgttactccgggttactgaggtctacgacttttggtgcgggcttagggattcgaaccctagtctcttgggtggaagccaagaataataaccagactatacgaaacccgctttaaattggtcaccccggaaggatttgaaccttcgaccttcggattccaaatccgacactctaaccagactgagctacgaggagataataaggcccgtatcgggcgttcgactctgcttctaaagcgaagagtctcttttggaaattggctccgtacctaggaatcgaacctagcgcgtttcggttaacagccgagccccatcgccttgatgggccgtacggaataaaactctggagcctcgtatcggatttgaaccgatgtatggcagatttgcaatctgctgcctgatcctctcggccaacgagggcaataaactaggaggtttttaacccgggcctctccgggagatactggatcacctcctatggcttacagcatctaattcaaatctaggagctataacgggcccgagccggacgatttatactggctgccagtagcttatcacagctactcaattacccgtgccagcttaggcgcttccccttaccgagataggtagcgacactgaacccaccacttagggttcctcggagtgcaatttggaagcgagaggtggaatcgaaccacttgtattcggttatgagccgagtgacagcgccagctagtcttaacgctctcgctatttggtggtcgaaggaaggaattgaacctctagcctatggcgtccgggttacagccggatgatagtagccatctatctctacaacgaccttgttggcgacccatgtcggattcgaaccgacgaccttgccctagacaggggcttgctctagtccagactgagctaatgggcctataaattctggtagccagagaaggacttgaaccttcaaccatccgattatcggtcgggtgctctaccaattgagctatccggctattgttgttactctatgtacctatattatcatgaatttcttgtttgtcaacccttcatgataacttttatagcgccggggaggtcggaaagcagcgctaccttcgtcacgtcccctagctctctcactatttggccgccatagaccggccatagtcgccgggtagggactcgaaccctaaccaaatagcaaaagagattcttaatttggtggccccggagggacttgaaccctcaatcctctcggcgtcagtttctaagactgatgtgtataccaattccaccacagggccaaaatttggcagcgagtaaaggagtcgaaccctcaccgctcatcgcagtggcctagttttctagactagttcccgacctactcagggctactcgctaattatttctctatctgataagtgtattaaaccatgaaaaatctcatttgtcaataccttttaccaattatttggcagtgagcagtggtctcgatccacatccgcgttagcagacgtactccttagcagggagcctcagaacccatctgatttactcactaaatttggttgaacgggtgagactcgaactcactataagtctggttaaaagccagatgctgatccactttagcttccgtccatctaatttggcgctcatactaggattcgaacctagaccttacggcttagaagaccgttgtgctgtccattacactatatgagcaatttgtgtcactatacaggagtgaaaccatcctgtcaataccaatttggcgggccgactccgattcgaacagagaatacgaggatttggaatccagtaggttgccaattacgctcaccgacccttaattctggaggacacttattactcgctgtcctctgagcgagacacattccttgtcgggtgaatgttcttttactacatttggcagccactgatgggatcgaaccatcatctccagattcaaagtctggcgtcctaccattgaacgaagcggcaattaatcaaaacgcgagaactactccgggagtcttgtcctcttcagtgttctcattatctcctgattctgttccttttgcaagctcttttttgagtgcaatgtcagctttgtagtaagcgacgaacatatcagaaagctctttcttgagcttgattctcatttgtagagaaacctcaggattgtcagattgctcttgtaggaacctaatgttctctgcaaagctcttctttagaagtctgagtcctgcttttaggtctgtttgaatgataccccgggcttctagctcggcattcgtagggcgaccgcccttgtttctttcttgagtcatattaaatcctctgaagctttgtaagccccatatactccgattatagcacgaaatctcctgttgtcaagcccttaaagaattattcgcaccgtaatctattatttatatgtattgtcagagtacgcgcactctatatacaatgtcagtccccggtagggagaggagcggtaactccttcgcttggataccaaccaccaaaatactcatgatccagtgtaggattgagagcaaacctacggcaagaggagcatagatcgtcttccttaccagtatgtttattgatgactggagtctcaaacgagagttcgctatcacagcacttacatctcatagaaattccttatgggttgattgatggattatctgtggtgggtatttgtgtatgtgtatcaggagaacaccccatgcagatagattcggctagggaaggatagagtcgtcccaaggctcgccatacagaatttaatctgcctaagacgtgccttggctctatccaattcctcttactcatgcagatgagttcggtgaggggcagcatgtaggctgcatcggattgctgtcattccgctttcgcgtcgtctccaccctttaacagcattcgagttcaggttgcccttgtggattcctcttcataggcgctaggcgtgggccggtgagtgctttcagacatatctctcccacgctgaatattgataataccacagatttcctctatgtcaagcctttaccagaacaaaattggttgacattcctgagaaacgtggtattattgtaaaacactaacccgcaaggagtaaaagaatatgcaagttatcaatatcgtagaatacaaccctatcgtctggcttcgctcgattcacgcccacatgaaggaaggtttccgtgtcgttcggtcgattgaaggctatcctgtgtacggtaccctctgtcaagtgcagatgttccgtcaggaaggcgttccggatgaaatcgaaaaagagcttgacgggaatgaagtggttgtgcaagaatgggacgttttcagtcttctgatgggtatgcagaacgctttcgatcaaggcttcagaatcgatgccgacgacccgcactttgccaacatgagcttcgctctcaagtctgtaaagatggtccgagaaggcgcagagaagcagactgaggaaaagtctacagaagtagctaaggaagttcctgtagaggaagtccaagagactgaatcggaagataaaccaaaaacccgccgtcgtcgtactacaaaggagaaaagtgaatgaagtttaacaaagcacaacgtgagtttttcaaagactacgcaatccagactgtgaagtctaccctgatgcaggttgcagcccagaacggcctagagatcaatcaggaagctctggatcgcgctatggaagtcgtaaacctcgaacctctggcggaagcagccgggactgcgttcttggaacgagtagactttaaaaccctcgtcaaggttgacaagtttgtacgcactgaagaattcctgagtgtagctcaggctggtgcagaagttggtgaagctgtcagcggagagctgagcacaatcctccttccattctttgcaatgctgggctctggccagaaagaaagcgaggagtgattcagtaataagggccctttcgggcccatttttgtaaaggaggtattatgcctgtttcatgtacacaaagtgttagcaatcgttactccatccttctgccgtacgtaatcaagagcctcgaagaactcacagaggagctttggacccttgaaaatgcaggtcagaatgatgaagtgtacatcaccattaacggatgcggtggacaggtagagaccgccaacgctataatccgagcgatcaaagagtgtcaagctccagtgcatgcacgtcttgaaggcgagtgtgcgtctgccatgactgccatagcgctagcctgcgactccgttgagatcgaccagttcacatatttcatgatccacgcgccttcttttggcgttgtatctgctgatttcaggaatagcctgaggaatgcagcgtttagctcagcgtggtgcgataaatgggtagatcacgtctacagtgacttcttgactgagaaggagctagagcgtgtcaaggcaggagaagagctttacatcggtggcgaagagctagaagacaagctcagcgatttctttgaaaagaaacgccttgcaatggaagaaatttcagagtagtatcatcaggccgggacattagtcgccggccatttttgcggccaaaggaggatatacaagatgttcgaactaatgcaggaactgaagggttgggctattgacaacagtaaagaaggcgtgtaccttcagaagatcagaaaggagtggaaatatgttgaggattacatccatgctctggaggaactggcgctgtcggttatgccttccgagctgctaaaagagattcaggaggattgcggagtatgagagacgagtttgaagcgtggttcgtgcgtaactacgcggcccaaattaaggatgggcaccatggcttcacccttgatcgatatgagcatccgccgcatcaatacatccacgacacaccacatcatgactggcggatatggcaagccagccgcgcggctctgagggtggagttgccggagaaaatggagcccacaagaaacatctacggcaacctgataatcggcagctacaacgcagtgcttgatgccgtgaaagaagccctccagcaagccggaatcgaggtgaagtgaatggcgacgcgaacagttcactacgacgagtgggacggcggcacagaagcggacagtgaagaaccgtatgacgtcttctgtggcaccgatggcgacttcgaggagaagaacttctcccgctaccgcaatcatatcacctgcaaacgatgccttaagttgctggacaagaagaaggaggctgcctaatggacaccaacaagctgaaggaggattactaggtatgaatagtgtatgggtgatatttggacaactctgggacgactacagtggagagttcgatctccacatgcttggggtactgggcaataccaaagcggagactatccgcagggttgtatcgtcctacccgggcttgccagaaccagacgaggagcttcttgatttcatcgtagcgggcctgattgtaaacgcagagtgtgaagtagacattccgtgcgggaagacaggaaaagacgagtgggttatgtattctattcgtaagaaggaggtgtaccaatgagtaacctagtgtgggaacttgtatgggaagaagattacgagcctgacagtagaatgggtctgtggattgggaaccctccgagtgtagagcagttagctgaagtactcctaggtgcggactggagactgacagaggacaaagtagaggaggccgctcacagccttctgaagagtggtggttacaaagtgtctcaataccacgctctgagtctcgatagcttctttgcagatactggactaggaaaggaggtagaaattgacctcgaagaactctgatctttcaactcagatgattgataaaatcattgcaaaagagtcggtagtggggcagtatacagtggctaagcagaaggtgactgtgatcgactatgaagagttttcacgtctggacttccagcctccggccacttggttcatcaaagatgcatcaggctactacatctttgtccacacatctcagcgagctaaggctcaagcgtggatagatgaagagtatggcaaagggcgttacaccgtcaatgccagccgagtgcagaagaaacacaacacgggcgaggggagcaagccagcttacggcgtagccactcgtcgcggacagaagcgataggaggaaatatgaaagtagtaaaacgtaacggtcacaagttggagttggagagcgacgagatcaatatgctggtaggacttcttggtcacctctcggcttcggctgcgaccacggacttgggttggtttatggaagacctctaccaagagcttgaggttaaaagtgatccggaggcggtgaataaatacgagcaggagtttcgggcaaaggcctacggcagtgatgatccctcggacttcgttattttaatcaagggtgcagatggagagtacaaatgaaggacgtagcaggaagggatatcgagatcggcgacgcagtagcattctgcctaggcggaactggaatggttatgctggtaggcgaggtggttgcaatcaatcctaagactgtcagtgttaaagctgaagcgtgggacaagtggagcggaaagccatcagtgcaagtgttccttcgccggggcgatgccgtttgtaaagtagaaaactaaggaggagatatgactgaaccgactgaacccactgtaatgcgcatcgacgatgtgatcgaggctctacagactcttcgcactgtgtatggcaacttgaaggtagcggagattgaacacggagacccgacttggagctattacccgcctagcgttgtctatttgacagacactgacgagtactacatggaattcgcgtgccctgaagaggggtactacgaggagatcgcggttctaattggaggttagtcgtgaaggtcaagcacattaaagcttacatggaggccgctgaggccttcgctaagtgcagcgactctactcgttccaaggttggtgcagttctagtaaaacgtaaccgtatcatcagttgcgggtataatgcccttccagagcacctaaacgggccgctggaggacgaaacgggagtaaccaaggcagaggtgaggcatgccgaagaaaacgcactgagggcccttatacgcagccctgagagcgcccaaggggctaccctgttcgtcactcactcttgctgtaaaaattgtgctatctcggtggttgaagctgggatcaaagtagtgtactataagcacgaatatcggctcgacgaaggtcttaggcacctacgggagaatgatgttcttgtcatcaaatacgaggaggaccaatgagttattttcaacggctgtatggactcgacaagaaaggcgggttcaaggagtggactgtagaggtgatcggagaggaagacggtagcttcaatatcgtcgtgaaatacggcaaagaacatggagccatgacctctcaggttaccaacatccgagttggtaagcagaaacgctctgtagaggagcaggccgtgtctgaggctcagtccaaggtgagcaagcagttggacaagggttatcgtgcagccaaggaagaactcaacgatctccctgttatggctatgctcgcaaaaccgcttgatcccgctaaatacaaagaggggtatggctctcctaaactagacggcctgcgttgcatggctaagaaagccaatggcgtagttacgctagcgtctcgcatgggtaaaccttacaatgtaccgcacatcatcaaagaactcgaagagatcatgcaagagggtgatgtgtgggacggcgaactgtacgtccacggtgaggtgctggaggatatcaactcggcggtcaagcgagaggatgcttacgataagtggatgaaggccgagaaagctcttgacgcttaccctctagagaacggagaggaggagtatgatcgtctcctgaaggaagtggacagcacgtcctttatttacggtcttcgtaagcggatggagttccatgtcttcgatatcgtaaaagatgccttgacatttaaggagcgtctggtagacttccagttccagtctgcactacacagtggtctggggagcattcgttttgttgagtacgtattctgctccacctttgaagaactgaaacgtcttcatgatgtgtatcgacagaaaggctatgaaggtatcatgtggcgtagcccggaagggctgtacgagtctggtaagcgctccagcggtctccagaagtacaaagagttcttcgatatggaaatgcagatcgtgaactacgtggtagacaagaatgggaacgctgttctggtggtgtttgaccctgtacctcaagagctgcttgaagtgacgtacggtgactttgacgaacgcaaggatcagatcactaattttgagaactaccggggtaagtggctaactgtgcaaattcaaagtcgtttcaaaaagaccttgcgtgctcagttcccaactggtaaactaattcgcgctggccgggtaatcggcggtgtatttgtccctgaagaataaggaggatataaaatgttcaacgctaagtctgtcaacgtgaccactgcaatcgacgcggctgaggagttccagctcttggatacttctgctatccagattcgaagcgtcattcagttcatggatgctctcacttacaaattcaactacacgactgggtgttttgaaacccaaactcgggaagcgaagcatatcagcaagctgagtttcaacactgctgtgcgtctgcacaacctgtacctcgttcccggctcgacgatgacccagcacggcttctgggcccctgccggatgcgggtatcggagtgcagggttcatcgatctggttgtaagccctgagcttatggctaaggcgcaggcctgtaagattgtgaaaaatgccaaaatccagaaggatcgtaaaggcaacattcacattcagtcgatgatggtcgagttccccaacgaagactacgcccgtcgttacaacttgggctgaagtataatagccgagtgatatacagcccgcccacaaggcgggcttctttgtctaaggaggtgttatggaaaccttagaagctctcgttttgtcgatccttctagccttcattgggatgttcctagatatggaatactctcgtctcaaatacggcacagaacctgtagtagagttccaagccagtcccggtcaaatcatagaaagcaagcgcaccttgtgtgagtacagaaagccttgcaggttgttggctgaagctgtatacttcgaggcccggggagaaccggagatcggtcagattgctgtagctcataccgtcatcaacaggatgcagcacgataggtggcccagcaccgtagctggagtgctctacttcaagtgccagtattcctacacctgcgatgggagtatgcggcaaggtgtcaaggagcttgacaagtgggaggcagcgaaacatgttgcatacaacgccctatatgggtatactgtcgatccaacgagaggagccgatcactacctcaacgagaggaaggtgagacgggctaataatggcaagcttcctcggtgggctaggaaatacaagcgcacaatcaagataggcaaccacacattctacaaaggagaataatatgaacactcagcttggtatcgctattgagatcgcactctcggctcacgaaggtcagcggtacggagagaccaacttcccgtatgcttaccatctgaatcaggtgcatacagtctgcgtggctcgcaacgctcctaaagatatggacccgggtcaggctttctccgaccttccgtacatggacactcttctcactgtgtgcttcctgcacgacgttctggaggatacagagttgacagaggaagacttggagtccatgggcgtgatgcctcacatcgtagaggctctggtcattctcgataagaaccgtgctgagagctaccgtaagtatatcgaagcttgccgtaatcatccggttgcaagagaagtgaaaatttgcgatactatcgcaaatcttacaaattctgtgatgagtggtaactcgaagcggatcaagaagtatagcaaccaactgagcatgctcgaaagggaagcatcagttctggaaaacaaggcacggaagaagacaactcgttccgacaaattcaaaggctatgtaggagaacagtacagtgtggaatgaatataaagagcagtacagctacaccccagtcaccaccggggagattaaagaagtccttgcaagatgggagttagtccaattgcaggctgaatcggctgtagaggaagctatcatcagctattctcgtccttactctttcttcgagaagctgcgaggtgtagataagtggtctccgaaggagcttctgaagaaagacgcagtagatcactggctgggcgtagaagggcatctgtaccgagagggtaagattagtgcggaccattactgggtagtagatttccactacgagcgtcgagatatgttatcagagttcaaggctatggctagtatggagccggagcgtgaacatctgctgggaggggccgctatgcgactcatccgcaggattaacaaaatttacgaatttgaaatggaggcataatgtctgtatttttctcttccgatctacacttcttccataagaatgtgatcgagtattgcaacaggccgtggactttcgaggagcagaccgaggagcttatctctcggtggaactctcgggtccgtcttcgggatgaagtgtatcacttaggtgatttcgctttcgcaggtaagaacaagctgcaagctgtactggatatcattagacagttgaacggtcggatcaccttcctcaagggtaatcactgtgatagccgactgtggaagctgattgaagacagcaacctatcgcacgtcgaagatatccgagactacaaggaagtgaggatcgacggagttaagatcgtcatgtgccactatcctttcgagacgtggaataccgctcatcatggcgcttggcacctgcatggtcacactcacggtagcctgccttccaagggtaagcggcttgatgtaggtattgacaatcacccggaccatcaggtattctcttacgacgaagtgagggaatatatgcgagagcaagagtttgtggttgtagaccaccataaataaaaggaggaaagaatggtcaatgtgttgatttcgcgtgacaaggaggatgttaaacctaaagctaacactctggtggaactgatccatgacgacggagttccttttatcgtcctcatgacttctgatgttaaacaagacgggacttttgaaggagtggctttcgaggacgcccgctggacggatcagtttgagatcgctcaattccgagtattcgatggcaaagtaacgctgagcaataaggaggactaacatgaatgatccggtcaaggatttcaagaaaactgtaatggttgttgctgcacactacatcactcagtctgggctgactcaacgggaagtggcagagcggtgtggaacccatcagagccgaatctccaatctgatgaagcagcatgttgacaaattctctattgagagtatactggagatcgttcacaagctcggaggttataagatggtagcctccatggaacttgaagagcataacgtacttaacttcaacatcttcccggaggaacaagcatgaagattgataagaattcgtggcatatgtggctccatcgtacgttcgagaccccgatctattcggctatctcaagcgattggcaaactgtaactctctgttcctatttctggcagacggtgttcctcgtcgtgtggctggcgtcaacggttgtagcgctcgctgctgttgtaggctctgtattgtattctctggctctcggtccgcttaccggatacgttctaggtgggactctggctgtcatggggtttgtatggattgggatcatcgccgtcttttatggcgtgtgggttttctaccgattctctcgctttatgtcgagtaaatcgtccagcaaggatgggattctggtatcgtatctaaaggcaaagaaggctaaattctgcccgattgtcgaattgaaataaggagaagtaggatggaaggtaatctcaacattgcaatgtacaaagacctgatcgctaataagctggtgactgttaagcacttcaacggcatgtcgattatcaagtatgcccggaaggtgttctacgaaaacctgtggaatgagcaccctctccttctggaggcgcggggtcacgtattcgaccagcactctggtgattgtattgtacgtcccttcgagaaggtgtttaatcttggggagaatggcgctgggagtttcctccatcctaaattccgtgtgaggatgattgagaaagtgaacggattcatgttctccgtgactaagcacaatggctctcttattttcagtactacggggtcattgaccagcgattacgttgcccttggtcagaagtatgtgtcgaataacccagatgattatatcgcgggcttaacatataacttcgagatatgctctccagaagacccgcacattgttgaggaagaagaaggagcgtatctgattggtatgcgggatatctttactggtgaacagcttgcggagtttattcttgattcccacgctctaggtgtgacggaccaccgttctataaagattcttcgtccagagcacatagagtgtagctgggagcatgcaaagcggcttctgagttcctgtgagaaagaaggctacatggtgaaaacaggactaggaacggtgaagtgcaagtctactcactatctcggtaagaagtttatcatgaggatgggtagcaagaaggtcaattcgatgtatcaagacccggctggattcaagcagacgcttgacgaagagttctaccctctggtagacttcttggtaaatgaagtggaggaagtccggtttacagaaatgactgacgcacagcgtcgtcttctgatcgagacctacttcgatatggctcgaatctaaaggaggagatatgaaggagaagattctgtacatcattcgaggactcccgggctccgggaagtcctcctttgccgagaacctgtataacaagacttggaaatcgggcgggctggcgtctatctgtgaagcagatgactaccaaatggagttcggaaaatatgtgtggaaagctgagagggtggctgaatcccacaaaaagtgtatggccaaagctcggagttctatggaggtaggactagaggccgtgatcgtgtccaatacgagtactcgggaacgggagatcaagccttacattgacatggctgaggaatttggctacactgttatctctctgattgtagagaatcgccacgggaacaagtctgtacacgacgtgcctgagagcaccatggaagcaatgcggaatcgcttctctgtgaagctataaggaggacatatgattagctacgtaacaggttaccttgctactatcgaagaaccgggttttgcacttcctatgaaggaggcaaaggtctggacattcccgggcggtgaggtgggtgtcaatgtaagtggaattgatgccagtggagggtcttttgtgaacgttaaagctcagattcagaacagtgacgatatcatggcacttctcaatgtcactgaggctattcgagcggcaatgggccgaccacacatgactcttcttttgggatatgtcccgtatgcccgacaagaccgtcgatgcaatcccggggacgcatttagcctgaaagtgttcgccaatctgattaactcggctgggtatgatcgggtcatcgttgtggaccctcacagtgaggccactctgcacctaatcaataatgtagaggttgtgtctcagtcatctgtattcggtgggttgttgaatcggtcagattgggaacagtaccagattgtggccccagatatcggagctactaaaaggactgaacaatttgcaaaggaaactggagccagagtcatcatccgttgcaataagaaacgagacctccagactggcaaaatcgaaggctttgaaattctgaatccttcggatatcaatcctgaactcccgctacttgttctggacgatatctgtgacggaggcgctacattccgtagcgtagctaaagctcttagagggtacagtgaagtgttgcctgatctgttcgttacccacggaatcttcagcaagggtgttgattgtctactggacgacttcgggtgcatatacacatctgataccctccctcaagagaaccacccggagctaatggttgttcctgtcgaatactctagggctgagaagctatgagcttgagtatatggattgtggagtataagcgctcgtctccagagaagagggttgtcaaggtagaggagttcgataccaaggaagaactggacgctaggtacaaggtgttgcatgagaagttctgggaagactttcatagcaagaagcaaccattactgcgtcttccatgcgtctaccctgtactgacactaccagtagaagaaattgagtattgacataaggcccagattgatataatctgggcccattcaacacaacaggaggaaataatatgaaaattctgccgcacctgtccaccgatggctataagattgggcacggctcgatgtactcggaaggaactcagctcgtctacagcaacctgactcctcgttccgacaaaatttatcgtaagactcacgccaccgacttctacgacggcactcttaagtgggtcggcgggcgggctgcttggatggagatcgtcgagtcttgggaaggcttcttcaaggctgacgaagagaacgcagttggccggtatgcccggttcctgactggttactttggccgtgagatggaagctgtagagcagcttcgagccctccacaagctcggttatctgcctctggaggtaaaatctcttaccgaaggcgtcagtgtgccgatgggtgtgcctgttctcgccatcaagaacaccctgcctgagttttactggctggtgaactaccacgaaacactgatttctgctatgacttggaagaccgcaactaacgccactatcgccgcagaatacgcagctatgggccgatactacgcgaatcacactggatgctatgacgacttcctgctgtctgttcagttccacgacttcagtgcccggggcatgagcgggatcgaagacgcagcccgtagtggtgttggtcacttgacctcgttcgtaggttcggacacattggcagcagctatttatgctgaggactactataacgcgactggtttggtagcttgctccgttcctgcgactgaacacgctgtagctactagtaacatcctccgcattgagaaagaaatgaaggatggagaaggtaaaggtggccgtgaggaagcagaacgtcgattccttgttgaactgatgggtaagttcccgagtggtattctgtcttacgtggcagacagcttcgacttctggggcgtgcttactgacattctgccgtccatcaaggatcagatcatggaacgtgacggaaagctggttgttcgtcccgattctggcgatcctgtagaggttatctgcggactgggcgatgtggaagttgttgaatctcttgagcactgggatatcatggatgcggtcaacggaaatgacgcttttgttctagagttcgaagataaatatttcaaggtcattccaaccgagtgggaccagtacgagtatgtagttggctataaactagaggaagttagcgaggctcaggtgaaaggtgctatccaagttctttgggaaaccttcggtggtactgtaaacgaagctggttataagatgctggattctcatatcggtttgatctatggggattcgatcaccacacgtcgggcagccaaaatcttggagcggctcaaggagaaaggtttcgcatccttgaacgtggtcttcggagttgggagttacacctatcagtgcaatacccgagacaccttcgggttcgcagtgaaggccacctacaccgaggtgaatggagaaggcattgcaatcttcaaagaccccaagactgatagcaagaagaagtcggctaaaggtctcttgaaagtgtaccgggaccaagacaatggacggttcctccgactgaaggatgatgtgtcgaaggaagaggaagctaccgggcatctgcggacgttcttcaaagacggtaagtgggacacggaagatttgaagaacaatgatctggaatccatccgttatcggattaagaacggcgtgtaaggaggcgaggatgttggctaaatattattttacaaccttctgtgagcaaggccgaccagagaataaaggacatagattgttcaagtttaaaatctgggagaaagggtactggtctccattcgcagcattagacttgatgtacgataagatcagagctgatgcggaaggtttgaatatcagatacacaagtgtagagaggttcaaatgattaaataccgaaagggcgatcttatcgcagcgttcaaaaacaaagagttgcacgctattgcacatcaggctaattgcttcaacaccatgggcagcggcattgctaagcaaatccgggagcaattcccggaagcttacgaggcggacctagctacggagaaaggggaccgagcaaagctcggctccctcaccttcacaatgaacgagtacggatcgatttataatctgtacggacagtacaactatggccgagaagagggtcgagtctacactcagcttgacgcactgggccaagccttgtacactatgtctctgttccttgaggcagaggctgacgctcgggcgattcctacctcggagttgtgtgtaggtctgccgaagattggatgcggtttagccggagaggactggagcaatgtcgagcctcttatcgaggagacactgggccagttccaagtgtacgtttacgaactgtaataggaggagatatgatccggggtgcaattaagtataaggggacttggttggccccgggctcggaggcgttccagctttatcaggataaaaagctagacaagttggataagcatctagtcaagctggacaaggcattcaagaaactagaagggagagagtgacatgtctattgatctggacaacctaacagcgtacgaacttctctatttgcaagctcaaataatcgagaaattgagactcaagtttgaagagtctggagaaggtgagctagagataaaagacgtgtaccggggaatgctcttaaccatgagcagcgatggatacactattcccagaggatgtgaatgcaaggtggtaaacatagaccacgcagacaacttctatccggtgttagtggagtacaccaaccaagaaggggattatcgtcaccactggattacatacggagaactgggacaaatggtgagacgatgagatattatacaggagtcggaagcagggacactccgaacagagaatggggcatccttcgagaggtaggccgtaaactggcagaacaaggttttattcttcggtcaggaggagcgaagggagcggattcagcgttcgaggcaggctggctggattatatatccaataacaaaggagggactacggcagaaatttatcttccgtctcccggcttcaaccagtaccagataacggagacgctcggagccaccatcctgccagaggaagagttgccggctgaatgggaagaagctaaaggcattgccagtcaaattcatccggcttggaactctgtcagaaatgacgggaggtccgttctaagcccgttcgcaagacgagcccacactcggaacgttttccaagtgctgggaatcgatctcaacacgcctagcaagttcttggtgtgctggagcaagacagaccacaacgggattccagaaggcgggactaggaccgcttggcaactggcgtcctctagaggcgtgccttgcttcaatctgtaccgccatgcagatagagacagaatcatggcgttcttgtaaaacaaatagaggtacagtcatgtatacagttgaggttccagaggttccggtagtctgcgatatcacagacccaaaccgcaggtgcatgcaatggattcgcgctcgaatcatccgacttaagaacaaccagagcacagggttcgaagacatttacgttctagagcctagccacgttgatctagagtgcagatggcgagaagagaacgaccctgaagagcacgttagatgggctattgcgtggttcgacgttgatatgtgcgacgggcagaagttccgccagttgattcgatacgatatcaacaacatgttcaagtggtatggacctgctaacctgacatgcgaaggcgtgttcactatcgagaaatctaaggtgtgccctccgtatgttgacatgtgaagagatcgaggagctaaagtctcggataggggcgaatgctgatcggttgattcacaaggtggagagggggcttgttcctcctctagataccagcagagggcgaaagccctctttctttttcaacgctgttcagcctgaaatgtacgaagtcatggtcgagctagacggagactacccgttgtgggtagacgacgttctccaaggagttgcccggctggactggtacagacccgatgaaaggtcgattcctctttctgcaaaaaagctcttgacaatttttgcaagtcttagtaatatcaacgctcacacgataagccacctcctgcgggttgaggctagacaggctaatcggtactacagagcagccgaattcgcacaccaaaaactgattgacggattctgcaaggatgagctaagatgcatgaaatatccagagacattcgtctaccctaggcaggatgttccccagacagatcaagaggagggttagtatgttcaagaaattggtagccgttgcgtttacacttgccctgcattcatgcggggtcgctcctgcttatgcagaggatacctcgggacgggacgcagaatactgctccgccgtggttgctcacttgacaagcatgccaatggaagctatgtcggctgctctggatgttcgcccgggtgatgatccggttatccgagtagcaaacaccatgtacatttacacctgcaaggtggatggaaatctggtactggtcaaaggagatttcgagaagggattctatcgagcattcctcgtccaagaggatgaatacaactactacatcagccgggaggaaatgctatgatcttcgacaagtatattatcgcgttagatacgttcaaggatggtactgaggaatacgccctgtttagccggggcgacagcgggtttataacgtacatcaacagcttcgcaaccaaatacgcagctattgaccatgcgttcttcttggagtacaatcgctacccatcggcttacgaggaggctgacctgtacaactgggttgtgatgtgctgaccgcaggtcgaaccaaaaatttcgagccctagtggggctctcagaggaggaaacaatgagatcagttgcagagttgataaagatgggactggaagattacttggtaaacggccgggacacgtatatgtgttatattctaagcgacctagcagaagaagggcaaatctcccacggagagtatcggtcattcagagagtggctactagaggagcatgggattccgtcgtgggattcagttatctctcttcttcatcgtaattacctgctagatactgatctaaactgggtgaacttttatgtctggtcttatttcgacctgattcgaaaggaggaaaaacaatgaactctaattctattgcaccgctaatcaaggagggcatgcgggcattcttagagaacgaagaagagccttacatgtgctacattctggagagattggcactgtgcagtgactccagcgtcaccgtctcagacgtgggacgatttaaggggtggctagataagacctttggaatcgggccgcttaattcggtaatgcacctcttggacgaagtagctgattcatgcgtgttatccatgttcgagaataaccctccgaacaaggactgggaagactattgggaaggctgggccataggcagagcgtggtgcaacttctacgtgtgggcctacttcgacttgattcgaaaaggaggggagtaatggagataatcccaatgctattcgtcctcgcgctcgcgtggggaattgtgttcatgtggacctacatgggtatcacggagtatttcgaagataacttcccagctagtgcgactaaagatcacagagagggtatcgaggcttttgccattgtactgggactgctatggcctattacattcacagtgtatgctagctttctgctactctacgcaacatacagcgttttgaaagtggtgttgttacctaagtgggctctgtctatctggaacagccgtaaactacttaagaggatcgcaccatggaacaagtagggcttctcattctagtatgcatagtcgtcggagtggtctgcctattgttctactctgtgatagggatgttcgtatgggaatctctacgaccccttcttgggtggaggggagaaagtacggagaggcgtaagaaagaggcccgagcggtgttagctggaatattctggcctatcgccgtaccgtttatggctatgctattcctcgttagtctacctagaaaagtgtggagactgactagggtagctatcacaggagaggaggactgaatatgtttaagaagctgttcgcatggttccgagaggaagagcggaacgaggagcctaaactactggaggcccgggtcgaggagtgctacgaccccgcctcccgacctatcaaatacatgagtgctgagcaggagaaccgcctgaaagaactggagggtaaaatcggagaacctgttaaagccatctgtgagacattcttcgactggaaacggtggactgtataccgagactggaggcacgctttccagtctcagtctaactcggagaatgtaaagatcaccgactataagaccggcactacgctggaatggaaagccgtctctgatactggacgagtaggtatcatatggaaagaccttccactcgtacagcatgacactcgtctagggctgctgtatcaggaatggatgaccgccgaggagagcgagtatgcaactcttatggcaaggaaagctatcagcgtgttggcaaagaagaaggaccatatctcaagagtgctatcgcgtagaaaagagcgacagaactacagagctgggcttgttgatcgtgcgctgatgatggagaagtatgtaggggtccaagaaggagatgagtgggatatcattctaaaaggagctagagagcgtctggaacagactatcaccacagaaggcttgacaatggactgggaacgttttacactcccataaaaacacagacaggaggaatacaattgaaagagcgtttggtgaagttttacactattgtgaagacccccgaagagaacattgcagtacaacagcaccttaaggcttatggtatcgagtttgggagcggaaacggcttcgtgtacgacaaggctcaagtgctactgtgggttggagataatctgctggactacactcgtaaaagcgacggaagtccaatgacattcctgtggtacgaggaagaactcaaagaggccattggatactcgaaatcgacctacgacttccgaagggtagacttccatttcgtcactgagaagaaagtgaccgcgtacacgcttcatgagtgtgacactggtcctactacagagctaaatggcacctacacgcttcaagcgttgaaggaaatcattgcagacatggaggaagagaatgaaaactaaagagatcgatgtcagcaatttcactgccgaacagtttgatgcgttccttgagtactgtcagtacgctcaattgaaggtaggagagggcgtcgttgataagatcagggagtggatggaacaccctatctccgtagatgggccagatgatagtccacggtgcctatacatccgggatcatcccgaagaccggttcattagctacggaactggcctgcgaagcaagtggcaacccgatgtgtatgacttgtatcggcctaccttccagactaagtgtgtgatgactctagggaaggcagacaagtatgtggtcgtaggagacgagaccatttcactggaggagctaaagactatcctagctaagcaaggggtgtttgctgcgtttggagggtctaatgtctgagcaatattggtatccagcccctatcgggtgcatcaaaagcctctacgcagtagctttggaggcttgggccagagacttctggaatgagggtaatctaagcaagattctccgtcataatggatttagtccatgccagagcatggagaaagtgttgcaatacatggaccagataaacgaagagtattgcaacctcatgatgaactacgccactagggagtatatggaagagcagagacaactggaatctcttcatacataaactcaaggcaataaaaagccccgggatcagctttcgctgcccggggcttctctttaccacgccgatggtctagctgttgtcaatctattccctacacctaccctgtacacagcggcagtcccttctactccgagtgcgacaatagcttcgtatacagttgcgaatttgccatctgcactagctgcaagcggagcttgaatattatcttccattctatattccttctatttgtggtgaatctatacaaccatcgcttatccagctataatgaagaataagcacatcctataaggattatagcacgaaaataggaaataagcaatgatggcatttagccgctaaaggtatattcgaatcctaaacccccgccgaagagagtgatacgtttgtagagtgtgcctcctctactgctgggaaaataatggagggagcgggcctaccctctgctggttcgccttctgccagttatggatttatttccgagctacttaaccacgaacccactaggcatacctaacctcacgtaatcccaaaataatgggtggccgtggtctttccttcttagcgacagctaagctatgcaaaactaatgccaacgggctcccgccctgcccggtaaaatctttccgcatgttggcatggaatatgcatatacgattgatagcttcgctatcggattactcgcactctagacgggtagccgttgggccatgggagactactgcaacaaaatggtttccctaccttgtgcaatatccttgtcaagtttgtccactctatcaagcagagcttgaacaacgtctacactgtgaacgtcttccatctgatagagatcgatacattcgaggatggattccatcttggcatgttgccatgccacatgcgctgccattggatcgtcgaacgatcctagtgtggtttgcttccctagcgttctacactgtgagacgtatacaggcagtctccatcggtcaaaccttgctaggcggacgcctagaggtagatcattgttggcacggttattgcttgtcttgtcgcagttggtgaagagggtatgaatgtatgtaggcgtgaactcgcacgtatgcggagcatagagcttgtttcccgggaagaggatattcttatctaggcggtagcctacggcgtaccctgacacattcaccacccaatcatagaacgcttcaaagcctgtcttgggcttggcccattccttgcatatctcatcgcctgcgatgacacgtttacgcatggcgtagtagatttgcttagcgtaatggatgtgaatcttggcatgattgttgcttgtcattgtgcctccttgtgtgaatgttggttactcgatagcggcagctatcaaccttttagtttaacgtatttactgggctagagtcaatgttttcagtgtcaccacttccggtcgcaatatactaaagggtagagcctacacttcacagaccactttgaaagctccgctttcgagggttacccttgtcatgcttatgcaattcgtgtgccatgcaaaacgggatagcggagctatcacagggtatactatagcatgcatccgcatgcaaagtgaagtcacttctgaggcgcatgggagaccagttgcaattctcattgcaaaatgagaacggatgtaagctgtcgcttaacacaatcggcaaagtggtagcgcggaaaggggttatacccaaaatctactcaaaacaaccaacatcctatgctaatcgcatatggccttaaaacctcctacaagcctcatgccataaggctttcgccttgacggtgcagactaacatagcgaagctatcgcttcatatacggccttacaggccgcttaaaaccgataggttttaggtgggttattgtggggttatttgatagggtgaactggacagaatgctatctgtacagctttcgctgtcatgctgttatacatgtaacgtcaacgttacaagtggtctatcttgtcatgctggtgttacctctacagagtgttacaacattacatgttaattacacttgaaagctgtcgctttcgcagatagaacaaagcccgcacagggcgggctgttagagctttaatggattagtgcggtttagtgatggctgcggatgcacttagcttcatcgtggagattgcggatgcgctcggcccaaggatggccagagaactgatacccacgatgttccggcaggagcatcaggcggagggttgcacagcgttcgttctgtaggcgtgccagagtggcgttcatgatctttcctcgattaggcttcagtgaatggttagcgacgaagggttgcgagattggacccacaatgaccgcaccacttcttacctaatgcgataacccaatcgtgtttgctgttaccgccgttgatggctccacacttcgaacaacagatttgaacgtttttcatggtctttcctcggtgcgctcggcggcacgttccacgttacggtcatgcgccatacgtgcccatactgcggaccaacgcgttttatcggcagcgttgggcttgtacacgtcatcagggtgcggtggagggccataggcgttacagctttcgtcgtattcgtagtccatgttctttcctatgagaggccccggtcacccggggcttgttacggattgattacttgcgatacttcttaatcaagtcgtgagccatgctaatggcgtcagagtaggtttcaccaccagcttgcatttccttgacagccttgttacgcagtgcattcaatttgtttccgttgatggtgcctttttcatccttgacagcttcacaagcatcgcgcagagttttcagggcttggtaggttgcttgcatcgtcttttacctattcagttgctcagggtgattccctttgcttgatggccattctacaggaatggcctaagctgtcaacaactttatttgagttactgtttagggtaaacggagccccttcccgtcggagaataccaccagattcccgaatccgacatacgtgctagagcttccagcttcgtaagccttcaggcaggcatcaactatagtcatgccatctccgggttgaacttgagtccatttggttttagcccagccgtaccgcccgtagtacccctctctgacaaaccaaaccccgtcttccctgcgggcgtagtcgtagccgtcattgccaatgcgggagaacttcagatttgcctttgccattttgctagtccttctagcttaggagacgccttgtgcgtctcgataggcacagtatagggaacctctagcctcacgtcaacaggtattttccgggttatttgcgctttcctatggccaccagtcgagcacgtagagcccgcttagtcgctcggctgagcttccatctggcggggtctcgcatatccttttcccgctgcttggcggccttgtaggcacgaatacaatctttgtaaggacggccatagccagcgcaggcaaagagcgctgccagtttcacaacccgactgtcatggtggacccaacgtgccgccaaggaaaggactggccgtctgccgtcgaaatggcagtattccgcaatgatgttatccttatacttgttattcatttgatgaccctcctcggtcaatgcaagatttgcgttttcaggttgggacgcgggtcaatatcaatgacattctcctctgaggcgaaaaggatcgcccaagcggataggtggtcttttgctgtcatatctttttggcggatatgttgccatgcggtcatgtaactatactcgtcgatctcgttagcaggcatagtatatgccgggctttcaacatcggtaaacacgattcgagggtcagccagataaagatcgggtgactcgcattgaatgtgaaacactcggcaatcttcgtccaaggtgacgattgcgagacggtgattgtgtgctaccgggctcaagcctgaatcgtactcagtatgcgtcgcatagtcgcggatatgattctgaatactctctacagcttccacaaggaagctacggacagtttgaacgctataggcggaatccaagcggataatcagggtattcatgctttctatctcctattgtgagccccggctcgccggggctgtgataattagtcgattacggtttccatcctgcccgggcgacgtattttatcatctttttcagcagtttatttcgagaggctttcatcgacggcggcacttgagtggtaactttcttgctgccgaggatagagatcatgccgtcgattgctttgcactggtaagagtcggtatattggcgtttcatttgtcagtactcctagtaggattttcttcaggctgccagttcgagcattgccacatcatgggcgtctttgaacaggatagcggcttcagaggcactatacccgcgttccaccatgaatgcaatccacttttcactgctacgatcatcgcgggcttggatggtctggcccttgcgcaggtgagcgcaatggttaaccttgatctcggctacgatatactcttggattttgatctggctcatcggggcggtcctgatgttgtttgctggtatgggtgcattatggggcccttttcgggccccgtcaagcattagatacctaattcagcgtatttttccatcttccgctcagccggagccataatcatggccatggtggcattatcagtccagtcggcgatcacttcgccggcgctgttaccgtagattgcccacatagagccgacgatgttgtccgggccgtcgcccttgcggaagcggatgatatcctcgtcggtagattgcaggctatcagagatttccttgatatcggtagactttttcactacccactcgccatcgctgccatctttcacgctaacagtgaagccagtacggattgcacgcattactgccgccatcactactgctttttcagcccgaatgcgcttttggaccagttcacgcgctttgatatcctcgacgagtgctgcacaatcgtactggcggacacccggcttgcggtaggcgttacgcagagcgatgcggaacagggtggcgtagggcaggctagtgccagaggccttgtccatgcgggcgacgtagtgggcgtatgcgaaagtgttcattggcttgttcattggcttgttcatggggagtctccggtttgtggtttgtcttgcttgagggccattctacgcgaatggcccaagctgtcaaccttttttcagtatcgatccaccagacgcgctatgtgtttaatttcttcctgagtgaagaaattccgcaccttgttcagaatattctgacaagccatgtaagtgtcaaaggcctttcggctatcagtatcgtagtcgaattctccacagaactcctcgaaagtgtagccgcccgcttcagagtcccggataaggctggacaggatacaggtagcctcaggtgctacagccttgatgtaacgtttttcccactctacccgcatcaggatgttaggggccagacggcggatgtcggcgggcatgggaatcgaggctttgcgatgcccgacgcctgtgcggaattcagtgtcgagaactccacggaggccatcgccacggatgaaacttacatcccacaggtcatgcacccaaccttcactattgcgctcacctcgacacacggtggccacggtaacatcgattgacttcaggaattcgtcaacggcggtttcgatttctttagaggaaaggttttcggtagtcatggcttatagttccttaggttttgcctatcggcggtttgtcttgcttgagggccattctacgcgaatggcccaagctgtcaaccctacaaaccgaagattttcaaaatttctttcgaagcctcaccggccgagtcatcccctaggtctagggacaattgctcggtaggacgtggagctacagtttgtgtgaccgaggcggacaatagtccggcgcgtaccatgctagcccattggtctatgctcacctcttggacgcaatcagcttccgccttgcggaatacacattgccggatgccgactcttacatgttgcttgtctacctcatagactctgatccgtgcggtagaatagaaggacagcacatcgtattcatcgccaaaccaatcgtctagctgcctaggggacgtgaaggcgaaatactcaaaatggcgaacatctggtatcccgtcatgctcagggacaggccgctctggagtggaagacgaattcgtcatgcacccgttaacataagggccctcgccgttcttgcactcgattcgataaactacagtcttggcattcatgcctgtcttgtcacccatgatcgtccctctagatcacattatttgctggctattctactgcccttttcgggctaagtcaaagattacgaaaaaccaaaattgcacccacatggcgtaagctggactcccgtaatcgacggcctcttgcatcgtcatcacataggcatcagccataccagtttcccggaagtagtcgtcgatcccgtcagacgttatccccgcttcattcatgatatattgaatgtcaattagcactccgtcgagattccccggcaggtctaactcccgcagacgtatgcacatataccacggcatcccggctgaaattgcgtagtggagaccggcttgaaagatttcagaaagtttcatagatatatctcctattcggggattttgttgtgaatggtgaaccgatgcatatccgccttgtggcgagtctcgataacaggcgtaaaaggcgggaaaacgtcgttctctttgccgtatttcactatctgctgagcatacttctttgccagcgcatgggtagtgaacagggccggctcaaactctggtccaatgccgccagtaacgatgtagcagtgattcgggctttcattacctgaggttcgatcaacgatggccattttctgtatcctttgaggtggggcgcttatgcaccccttggctaggcattctacaggtacaaaaacgcccgtcaagcattatttcagcctaacgggcgatattttacagcattgccagcttgggaagagcatcgacagtggtttcccagcaggctacaggccgcttcgattcgctgtcatactctagcatgatggcacggtcactatcctgatgaatccactcctctagcagaccgtcgttatgagtattccagtttatccaacctagagcatctagcctcacctccaccgggaaggctgcaaactcagccttgagcttggacatttgctcttcagcatgcccagcgtaggcaaagcgttctgcgatgttctgagcggcagcacctgagaaaaactctacggtccggagccagcgcctttcatagtatttcactcggcggacgatgacagcagcacgttggcggtattgtttgttggtgatatgtggagcgatcatggcagttcatcctctgctatcagttgacaggtaaaatcgtagtcgaaaacaaagcgagggtcaacttgaatattgaaccggctaaggtagcgggtcagtcgggcgtcggcattggtcgccacccatgcgtcgccccactcctcggcctcctctaccagccgagcattgcactctgcggcccggcccgggagtgtgtggtcgatgatgtaatcatcgcattggacagcagagcagagggtcagagttaaggctaagatcgacattggagcattcctgttttgatggagattgcagattacagtagttcgtaccgatagtcaagcttcatttggcggcacagtttgttccatttgaccagcaaacgaagcgccgcaggcatgggcagagcttccaccagttcagggtcgccgcctgccatacccatcgactcgctgaagtgagcgcttgtgaacagggtaatctcgccgtcccgctttccgccgacaacccggacgcctttgcaccaattagcttgggtcatttcccttgatctcccggattagatagcagacttagcggcatcgattgcagattctttatactcgaacggaccccaatggtagctgacaggttcgctcaagctagttccgaaaacgctcacgacgtagcatccataaacatcctcatagacggtagcagtacggctatcaccgcttgcgtagtcttcacttttgaactgagctacagcttccatttttgagtctcctaatgggcggtttgtcttgcttgagggccattctacaggaatggcctaggctgtcaagcattattttctgtcgtctttcagtgtgtagggccagcccagcgcttgccaagcccggaatttggctaccgttttaagagcgtgcgtttgattgatacagaatcctagcacggtcacccggtcacctctataaccgggctcagtacggatgatggcccacctctggccccgtttctctgtcgagtaagaggccgtcactggtaacgctcgatatcacgcagagtcttaagagcatcgttgtgccctatgctcaggttaggatgatacccatactcactcagagcgtcgattgcagcccggttgatccctttccattccgcccatgctgcaatgacattcccagtcacccggacactctcagcaccatatgcaacgaatcgggagttatgatagctgatccgcaagatgttgtgtccagctttgtttgcaatgtagcaggtagagccgtggccattcataagatcgccccggccagtagaagctagctctaaggctaggtcgatcttaggccccaaggcctttagctgggatttattaagctgtcgcattaccggtctcctttgtagcaagccgcacctgccgtcgtctggtactgagagggaaaccacttcactccccatgcggtcagttgggcttgtagttgccttgttaggttttgcccttggctagccttgcgagtttccttgtaatgaatctccccatctgcttgcaccatgactccggacataccctgccctagagcgtcatatacgacaattctgtgcctgttcttgtgatcctgatacaagactaccttgcatccgtttggagccgctaggctccgcacggttcgttctaggcccatcatcttacactgattgaatggtgcgtaaacagattcgtccattgtgttaacccttagcaatgagatcaacagttttctttgctgtgccgtgggcacggaatccgataatatactcccggtcggccacttggcacaagccgcacgacttacaattcaccttgtcgcttttctcagccggacaagctaccactttacgtcctttcggcgtaaagcttacattctccgcgtccatcgggagaatagtcactacaggggcgatgttcaggtcggccagttcatcggcgtgcgctacattgttgcccgacaggttgatagtaaacccgctacgattggccgacaatacgtgctggcggttcatgaaattgttcatcgggtaatgtgtgtaggtgaagccgcgacgacctttgttagccttcaccagttccatcagggcgatcccatcaataacgtcatcctgacccacgagatcgccagcttgattatgacgccacaaatccccacgtgagatagaccgtacttgcttaaggaactctttccactctacgccacgttcacccttgcttagctttttccagtgaatagcagtaggcccataagcggcatagcagcctttagccttgagagggcaggcatccgggcaggtgccgttatgagacgtgctaacaggcatgggaccggttttgctgtttttggaaacgagattgagagtgaagttcatgacggttatcctttatctagctaggcggcctgtccgcctttcttgctgaccattctacaggtattcgaagaggtgtcaactgtttttcaaaacaaaccacacaaaaatcgagaaagacaggatggtccagaacatccaaggtttgacactgcttaacaggatggctctacggtgaacctcttccggtacgctgtacccttggacattggtaggctcatcctctggcagaccgtaggcccgggcacgttgcttcattatcttccggcgtcgggcttttagtaccttagccatttcgttgtattcgtccgggtccgttgcatccctgacccgtcgcaattgtccctctagcttatcgacttcgccgagcttgctaaggtacgggtctatcctatccctcagcggcgtttcatcctcggtctggtcttgaacccacgacgggagccgctgccgtctagccataacataccgcccactgtcccgaagtcttaaagagttttatgtccttttgagcgggcagaccggcgaactccggcatggcgaacaaccatgcaaggcaaaaagcatggcgagcatcgggacagggtacgcattgacgaaccatttttggtatctccgctggggttgagaatcctaaaaccactcgacgaatgggcttaggattgccggcatttaagcctgccggcagggcacaaaccttacatatcgctactgaagtcgaaagctcggcctcggctagctttgcgattgtcacgcgatttgcgggactctttacgttcggaacgtttggcggcctcgaactggtaagcggaatcgaagtcggaagccttgatagaacgtgccattttaatctcctttctgtttaagtttgtcttgcttgagggccattctacaggaatggcctaggctgtcaagcttttaatcgaatttatactcgattccgttcaccttcgcacggataagggtttcgagattgatcgtacggaaagcggatttaccctcttccatgttcagcacctcggcagcggtatacaggtgcggcttgccagcgctggtcggtttgcgagtggcatactgtccgttagcatacgcagatttaatctggcgcttgcacgtcatctttcgaacggtgccgtctgccttgatgaactcgacgctgaagaaactgccatccttcgcttcgtcgaggatggaacgcttgcgatctacactgacagacttagccattatttcgcctcctttttgttcagcttgacagcccagcgcttttcagcttgagccccgttgtctaccactttgcgaccgttggttgccatggcgcgggcttgggtacgggttttgaaaaacatttgcatctgctttctcctcgcctatcggcgtcttcgttgtctgtgggtgctattttgcagctagtgaatcaggttgtcaagcatttatttcatctaccagtacgtagtattcgatcccacgccagcctcctcctactcgtgccatatcgccccggattcgctctactcggccagtccatatttctcccgtgccggcatgcttgaggaacttaccacctaccaattgttcgggcgtgtattggcacgttccgtcgagctttttccgaatgtcgccccggatagccacgatatctcctactctgacggtcatcagttctcccctcatgccgtttttacttcgatagaccgagcgacaatcggtccgtcctgcctgatattgtacgataccaccgggagcgattcccatcgacggagcatccactctgttttatcgcagtcgtctgcgaaaggcggcaggccgtcgcggaaagcgatctcatccgcaataagattaagtatatcgtccaacccctcgtctaggtcgagcgttcggccaagcaaggcgaaggcttgaatcaaggccttgtaactcagttcagagagaacgattttaacagaaaggctatccatcactaggcctcctccacagtgatatcagacggatacccgtcatggttgaccagcgatttccgcacctcttcggcatcacacatgatatcgaagaaaacaatgtcgatcaactggccattctggtatacgttccaagcttgcatttctgaatctccttatgctgtgcggaaagagcgtgtgtccgacttcacgtcaaagataaccccgacgccttggacggttccattgcagtaaaggctgtgccaacgggctgtacccttcgaatgcttcaccagataggtgcggcgacgatacatgtatgcgccgtcttcccattcatcatctttctcgatagggaagtagcggttcaaatctaccgcaatacgatcaagctcgctacgattgtaagccgcgtagagtgcccgatgattacaaagagctttcatatctgctttccttcgtggttgctcagggtgtttccctttgcttgagggccattctacgcgaatggcccaagctgtcaacatctttttctcaattattttcgttcttcacccaaactaacctgcctagcgtctcaggacgcccgcgtacctgttttctcgccatgttggtgcgtctgaaaccgaagtgattcagcggctctaacgtgccgtcttcgtgccggatggctaacctcagaggaaatgtgactactttttcctttgtgctggcgtactgctcaggtttagcgccaatcaatccgcaccactctttccatacggaatcatgaccatgatccggtcccgccttagcgtgagctatttcatggcggatagtatccaataccgcaggcactccattggcagctacgtagctgtaacctagctctatgagctttttagcgtgattacaacggcctagcgtccgtttcatcctgcgattgaaactgaatttccaaccttgttcgaggaggctccacttgtccatctcttgtagggccatcgcccgggcttcactatgtagcatggctgcttacctgccgttccgttgaatgtgggatcattgtgcatatataaaggaggcctgtcaacctgttttatgtagatttttctctataatttttcttgcctctcttgatagcttgtgtataatgacaggcaggcgggcaacgcaggcaggaggccgagcaccggagacaaacacggagggagcctgaaatttaggttggcacgctaattgcaattgcaaagactgtgccataaaaattatcttgacaaaggggtttgtcatagtagaatgggcgcatcttaaacgcggggtgcgagtccccaactacatatcgccttcacgacggatagtcgaggcctacgcctgcccgggaaactggtgcgggcttgcaacgttcgtgccaactgaggtccgtcctaggaatttttagttagtgtgctaacgattaaaggtagcttgctaaccaattagatagcctgctaacgatccgcccttctgagaaatccggctaaatttcaggggaaattcctctgtagaaaaatccccttctgtgaaaaactgtccagttcctaaaaatctacccagttctcaattttgtagtctgtgaaaatctatccagtccctaaaaatctgtccagtccctagatcagatcgcctcgtactcctcccgtttaattctgtgcagtactcttcgctgataccagctaattaagtatgctatacaagccctcttctcgatctctgtggcatccatctgagaaacaaactctttcatatccgctagccaatacacatactcgccaccgttgtcaatcttcattctaaccctcctattaagcgctacactgcccttctacagctaagtagtagctcaccatacctacactcgaacggctcttatacgagcattctgagccttttcctgagaaatttcatattgcccatattggccgaaactcccagaaatctaaaaataatttgaaaataacccctgccatgaaaaagcccggctctcgccgggcaattctaaaataatggtggcttattttcgccactctgctccgaccacggtccattcgcgggtccaccgcacctccgaggagctgtgcagattatcccataggggatcatctacactgatacacttaactaccctatccggtacagagtaataggaagacgggcggtcgtctttctcgttgtactcccattttacaccattcactaggtcgagattctgaagttcatccgggacgcttccagattgaatgtcggttgcctttggagacaggataaaatggatactccaccgctttcctaccggcttagcgaacacactaacccacttcgaatctttctcagtgaattcttttctatctagttccctctctagatggtggtaaccccaccgacccccaccccaccctcggctagagtaccggccctttttagctaggaggtgccaagtgatcttcacctgtccgaggtagatagcctctagtttctcctctgtcccgtagctaagaagagtgcatcgatcccctgccaccatatctttaacagttttggccgactcttttcgctccacgaagcttacagcctctttgtagagagaggaaccttccggcagtagaacgtgctgagaacccatccgtacccacacgcaaggctcttggatcacacctttgattactgtgcagttgtagagcaaggtcgagatattcccggtaggaacctccagaacgaaaccccgtgggtctgtcacacggaaatatttgttctcagtgacccagcgttcaacactgtccccgatgaaatgccccgagatagggatgttgtctatgaagcaagtctcggcattcttacctgcccagctcataccagtctgctgctttttcttgaagctggcagccaagctaccatctttattgaagtccacttgagacatgtatgccaaaagcgtccctttatagtcgcccttccgctcgcttttagctacccatagttgcttcgatatattgaattgcattttcttccctcctttgttggatgccgcaagtttacatattccggccaaccttgtcaaccacaaatttcaggcaaaaagaagcccgccttgtgggcgggctgaaagtgtggcgtccttgccactaacgatgtttgaatctctacctacaacacacctaattacctaattaccaaaggtcgtctgggtaggcttggccggactctcgaatagccaagtggcgttctagaaattcgatatgagcatcaaaccatgcacggatgcgttggtttggtgcaaagcgtctagcttctttgaactcttcgagttcctgccgcagacgacgcaccgagtatttacgatacacggcctctttccagcggctagtcattgctagtttccttatactgagtagggaatttcctacataccattgtaccattcgtcggctgattagtcaatctcaggctagcggccccggccagacagagatcgggcctcgaatccacctcttaatatcagcgagagtcttgaagccttcggacttgatcctaccttcacacccataagggtaataataccactttttaccctctttaccaagccatcctaacctctttttaccgaaccggacgatcacccgcccgtctggagtgacagggagaaagttgacacacttgttagtcgcagacatttcaccactccatgccgacagttacagttttggtcttgtcgtacatgttgcggagaatcgcttcccagcctactgccgtgggatatacagcatttacctcgtaggttttaccgtcagatcgcagtcgaacaacatcacctgccttggggcgcttgtcgagggacagggtttctacttctttaggctgtgctttcatgagtcctcctcacatcttgctgaagttttgtttgtagtcattgtacacgctgtcgaacagattcgcaatagcctgaatatgtacttcagacggggtgccagccgggagatacttacctttcggggtaatcagagaggttgcttcctgcccgttctcaccagtatacgtcacagccgcgtttactgcaatcttaatatcgcgggccgtagcctcgcccgggcgcataacctgtttcacttcgctaagaacacggtccttggtggtgaattcacaagcaggtttgcggtcttctaccttgatgcacatgctatacagcagcttctcgctcttcacggagcgaccgagattgatggtgccgtcttcagtagacacgacaatatcctcggcgggcgcgctcttgttggccaacgcagtaatcccgactacaaaacctattgctgcgagagtcagagcgacaacgacaatcaaagcctgcacaatctctttcatattcatcagaacacctcctagttaattttggaatccagtacgttcaacacagcctcagcagcttcacgaagctttacacggagcttgtcgcagtcctcgatactcacctgctcattcatttcagccatagtgataagcccgtgaatataccctgtgcgattagataacgccctgtcacggaagttctccgagtacccagttacgtcctcttgcaagcgttcgatacaggccgagacatactcgatgatcttctctgttgtagccatggctcctcctctgtctgatgtggccatcttactagcacttctattcgttgtcaaccctcttgctgtcttcgatatcctgtagaagctgcatcctgacgaacggtttatctttcgttgccttctcgcaatcagggcagtagatagtgcatactcctcggacgtacagtttacctccgcaggcgtagcacatgttaatgcctagcgagtctacaacattaggcttcatatgcttcactccggctcagtacacaagctagtaggcaggggctcttatcgaagctgccttggaaatgcccatagtttgcagattccccgcaacaagggcaaacgtagcccggtagagtatagatagcttcgtcttgatacacccattggatatcttccagtagggttttcacgacacgcatatcacacttagtgatagccaccttagccttgagttcggctacctctttttctaactccccgactcgccttgagaaagcgtcccggtcatacataacttgcatgtatttatcgaacatatccattagtctacctcttctaggatgatgtagcccggatacaggaatacttcagcgataatcccttgacgaactccgagttcaacgcctgtgacaccatttacatggatttgaccatgcttgtcctttgtccactgaacgcctttaagcaggttataggcggccttctcgcacaaggtcagaacgtgccgaccttcgttatcaagcacaatataccgagatttatcaatagtttgttccattatactacctcctcaaaagttggaactaagattcgttgctgtccattgaataccggtttatcaggctctacgtcattgtactcccagatgctgatgacgcgattatccgcagttacgcaagtgaattcgcagtacttagcccctccccacgcaatcgctacgtccatagcttgcgtcgctgaatcgaacggttcactggtctgcattagtcgctttttaaaatattctttcattaaaacacctccagtcctgtttcgcggatagcttctttgcagcgattgattgtgtacttttggatgtcgataaatccgccttctggcgcgggaagctcaacactcacttttcttcgactagccatccagatatattccgcccatcctttggcacaggatttacgaagttcttcttgctcgtcctgtccccaccatttatcgaactctttgcggagtttgatgttcatcgcgtgaactccacaacccatacagggttgatcccgccagtgaagtctcgacggattgtagcagtccatcccatatctatcaagata

SEQ ID NO: 8 - DNA, 91257 bp, Unknown
  source: /note="Description of unknown: bacteriophage strain capable of infecting bacteria of the genus Pseudomonas"
gatagaacatgtacatatctgtttctcttagcataggaactcgtcttgtgctagggagtttgaaaagggatagattaaactttctttgggcggcgtgtcctgctggagtacgcagagcccgagtaatcgccattgccatgtcagagacacttgctgtctctccatacttgccaactagttcgaatacgaccttggctgcgaagtcctgttgaacttgaacagttccatgcgaaggactaatgggatcgctcatgttggagacattttcccttcccagttcatctagcttcttaatatcgatagccagataaggggtttgcggttcctgattatttgtgtatgcttggatgacacgccaatcagggaacaactcttttatcataagatagagagagttttctagctctgtatggatcatgctgtactattcctctctactctcatacaaattgctttgtaatggtttaggattcccatcgaatagttgatgactttcataacttcatacaactctccttcccacatgaatctatcggcactccaccctcccggtccttcctttaactggcgaatctcttcgcctctggagtacaccttgaagcaagccttgcttctgtcggcctctggaaggatacgagtgtctgtcgatttttcgataggttgaacgttagctgtgattgtcactactgtctcaactggaggggtaggtcttccaaaaccgtcgtctccgggctgccctcttctaatcaaatctagcttgacaaagttggtcatggagaaggtaggatagagcattattgcctccgatggatttggaacttgacagactcaagcatcttgccagtatggaacaacggatcgttgaaccctttgtaagctgcccatgcgggactgttagagcccgggtagtcgtcaatgttaacttgcatctgctctgcaaccattctgcccagcttcttcaggagagtattaacctgtcttccatcgcggataacgttttcaaacgtagacttcattagtcttgcgtagtggaattgagatgtgaattcttcaaaggttggagccatgaatggccgggttgggttgcgagtagtaccgaattcgttgtaagctgcaacttgtgcaactggtaggtttccattttcagaaccatatcggtcctcggggaagaaaccaacttctaccgttgttccgtctagagcctccaccctcttaatcaaggatgtgaggcgacggcgatctgttttaaaactgaagcttgccaagataatcacaccccatgctaaggtcttgaggaccggggttgcactggttgtaaagcttctcccgtcttgcaaaaccgatgtagaattcccgtgttacgttgtcggggtctaggtcattagccagcatatccgatttggagataccgccagcatatggcacggccaaagaaattgtaatattcgggtctttgagaatgagctgaagagctttcaagtagttgttgaaatactcagcaccatatacttcgatatcacctgtgcgttctctcattccccttgtcaggcggaagagcatcatacgcataagttcaagtgcggctcgtctttcgttgccttcgttcttgtccaacacccattgataggtttcgtcggaaagcatcggaggctcccacacgtcccctacaatctctcgtagacggtcgatagggttgtttgctggatcaccagtgtaagccatttttggtaccctcctacgacgaaagggaggccgaagcctccctgaagtctttacgcattcacagtgccgcgaacgatcatctgtggacgacgcagaacgtggatgaagttggactcggtttcgatcaggatcgaacgacggtcttcagccatacgctcggtagcgtacagttctttacccagagttcctaggtcatcgaaagtgctgcccggtccgaagtaacgagcgaacaggtcaccgctgtcggttgggatgaagtaagcatcgccagccgggatcagacggttgccgtacgggtcaacgccacggtattcgatgaagtgaatgtttccgaagtagaactcacggaagcgaaggtccagaccgcgagcggttagacgttcacgccagtattgaggactagcttggtaagctttgtagaactctttgatgctcggatggttaatcagggcagtgaagaactcaggagagcacagggcaacgaagtcaccacggatcagaccgtcttggctgttgtcttgcatatggacgaagatttcttcggtcttgcccataacgtcagcggtagggttggtcaggtcgaagccgacaaccttacgagttttacccatcaggtcgtaccagtcgtactcgatggttccggctggggcgtagctcttacctgttacgatagcgctaacggaagcaacttcagcggtgttagcccagttgcgacggatggtttccagcttacgagcacgaacctcgttcagagtttcttcgcggtcagcaccgaaagcgcgcttaccttgaatatcttctggagtgatgtagtcgtcttggttgaagtgcggaatcgcgaaggcacgcagttgacgacgttggtcgctagcaacttggtgacgagttccacggatggcatccttaaccagaccgtagcgagtttcgatctcttcgaactggacagtgttctgagtcacaccttcacttgtgaagacgcccatgttctcgacgagggtccaagtgttcgggatgataagcaggttttcagtctggtcggcaatgtagaactgaccatcgtttaggtaggaacgggtgttagccattttttaaagttactcctagtatttatttactggaacgaccctcgcttacgcgaaggtaacgttctcgaatgcgccttcgatctggtcaacggcgaagatgttcttggctttgaaagcttcaaagacggtagctttatcagcgtcgtcaacgtcagcaccgaagataacagccttggagccgatcttggcaaaaccgcgagcaaggacgacagcgtggctcatctgagcgttggcatagtcgtgcaggtcggtaattaggatgtaggtagcgtcggcgatagtagccttagttaccagcttgccagtgctgtctaggacagaaccagttgttttaacatcaatgtcagcgacaggcagagtttcgcgagtgtagaacaggccacggtggcccatttgttcttctttcagccagttgctaagacgctgatgatcttttgcgataatgttttgagccatttggaattcctctagattggctagatattacttggagccgtggcgagctttcaggatagcggcaacaccggcgacaacagagtcgtcttcttccccagcgcccgatacacctttctcgacaagcatgtcattttggtcagcagcagctttaagaatgcggagcgttcctactgtttgtgcaaaagcttgatcgtccagaacttccagagacttgaaagtatcttctacttggtcagccgggaggacttcagccagttgctctttacgggctttagcgatagcagcggttttctctgcctcagcagccttgacaatttcacgaagagctgtaagctctacattagcggcgtctagttgcttctgaacttctgcaacagcagcgacaccagcagctttttcaactgcaatagcgtcagctagagcttctaggtgggccgatttcaggatagtttccatgttggtaatctccttggatggattttcattggattgctcggagactacctccagagccttttcaagcagttcctgatcctgtttaagggaaagggtctgctcaggggtaagctcggagagagcttgattcaggtcagccgatttataaaccgacttaagaatggacatagactcgacccgctggtcgatccagtctttgtgatctagttctggatactccgttctgccatatcccatggcaacagagagaacttcggcatcttcataatacatcccgaagaacttacgaaggaactcagggaactgcattgtgactgtaacttcagcagctttatcgataagctcttcagttacgccattggtagcttttgtgattagagtagtgtgcccgttggctgcaccaccttggagcttactgaccagagcgacatgagcaccttcgtgttcaaacttgatatcggtcagtttacgttttgcttttacggtcattcgatatcctcgactgtagctctggcaccgatagagacgcctgtgaattcaccagatttaacgccttcccatagtgcatcggctacttcagagccttcagggaagtgccaccactggagccatgtacctttcttgatctctcttccgtcgtcagttgtgaatgcggatggagcgatgaaggactggacaatctcagcttcctgtgtttcaatcttgtggaagatattagctacgttgcaatgagtattgaagttgatgcaagctttctctacttcctcttcggagtaggtgtctgcgtgtaggtcagtcgtggagtcgccttcttggggctcaagaacgacaaacaaagccatcctcttttcattgtctagggactttgtgacctctacagccggggcttcttccgccttggcgggagccccgaaagcattgctgagagcttcaataacactttcaagagtcagcattctgtctccttatgcgttatttgcagcggcgttgtctctaccggctgcggatgttgatgcaccattacctactccagctttacctgcttgagactgaccacccatgatattatccacatcaacaggctcgtcgtctggtcgaggcttaatcttgagagctttgcgaatcttgttgtaaacctcacggtcacgttcaagaccaccgacagaaccgattctctgaatccctttcgagaactcttcaagatcgatttcatctagctcaccgtattgcagcttcggcaagtctggactataatcaccgttcagtgcgaacagcgtaggaatgagtttattatctagtacgtctttgatttcgcggagccgcgattcaatcgccatagccatgatgttagtcttggcaccagctagagagtaagagccaacttggtcctgacccatcttcagcatatcggcaaacaaggcttgcagaattttgttgtcccaacgacgaatgatggcatctgtatcatacatcttactgccctgcgaagaggtcagttcgaatttgaacagaggttgtcggctttctgggtcaaacgcttgaggaaggataagtccagattgttcattcatttgaatgttacgaattactcgcttgtagtattcgtagactgccctctcagcttctgtagcatcttcggacatatatcgaggaggcagatagagcgtaggcataccgttcatatcgcgtgttacgccaacggactcttgctcttcaatctctactcgatatctccaagcgttatagcacgcacggagagggctgttaccttcaggactgtcacgtttagcatcgacccggaaaagaagcatcttcttagctggaatctctacagttccgtccttattacctaggttgacgtaacggtcgccattgacaacattggcaagactttgctcacaccctaggaagtttctaccgtcttcagagtacaaccatttggtgatagtagactgagagcggattggcaactttttaataccgaatttgttgtcattgtacttcgatacagggtatccttcacgtcgcttaaacaccatttcatgtacggagaatccgtaggtgtagaagctagtaacctctttgatgaaggagtaccaactgtgctccatgtcatgcatgcactctttcaggaatttaccacgggccttcatagcctcgtcggggtcaactcctagatcaacttcccagtcaaccctgctcatcatcatttcgaagagatcaagagctgatttgatggtagggtcttctgccatcatttggaatgttctgcatgccctagggaaccgaagttctggtcggcgttcttccagaatagtaccattgacttgtttaaggcctgtactaccaatctcgcctaggcgaagtcgcgggatacccggtgctgtcttttcagtctcggccatcgccgcctcctattaatttagtttgaatttgttggattgagtcatatcaggcggtaggaaatcagggataatcaagctgccaagggatagagcattaaatgcatctgatgtagcgtcaacttggtcatctttgatagccttacttccgtcgaatcgctcaagttcatcgaagtaatcttcgttccaatctcccgcaacgacttgcactgatttagtttcagctacagatacgaacggggcgaatcgagtaactttcgatttgttagttgtcttcggtctggcgtggaatccatgatccgctaggtctctaattagctgggcagcataagctttaccagcagcccccgggtcacatgggatttgaatttcaacgtcttgaccgtcttgcttggctgtttctagaatgaggtcgaaaacacctccgaacaacctacgctctctgacaacatcctcgacagtgaacaagccttcttttgtacggctcatcagcacgccggctgtccagtcggggtttctgttggtttcggattcgatgctaccgctgatgtcccatgcacgtacccttttaagcacccgtagaggcgggtggggaacgatttggcaccagtcccttgtgaagtatccagctccctcttctctagcgtgccagctaccgtctaggagcttttcacgttctaccctaggaagggcttcaaggttagctacatactcagggtcgttgagcatcaagattgggttatcgaaacagttagccgcgatgaatttgaagctgataggcttcacctgatcttcatcgtcaggcgctagactgggattaccatgaagggcaatgcactcttccttggtgtctccccagaacatcttaccgcctttgcgtacaaaccagcgagttacgccggagcgctcagggatcgggattcctgtgtcagggtctagccaccattcaatccatttacgaaggaacgaattgtaatcagggttacatgtaatcttcatgtgcggaacaaccgagcatttcgggttacgcatacgagagataaggtatgtcaccatgccttctgtgaactgctgaccttcgtcgactaggaacttactaacctcccaaccttggaaggagtctttgtcagattcttgttcgaagtgtcgaaggaaaataactgcaccagaagagaacacaaacttgccgtctttgtctttccacttgactttagggtcaacgagcttgaataggtctgttgctttttcaagcagaccgcccgggcctttaatctgaggagtagtacgacgagtcattacacctcggaagttaggatcatggatatatttcatgaagtccattacaccgagataagacttaccagcaccagcagcaccaccgaatacagtgatctttgcatcgctgtctgtgaactctttctgtttgaaagattttggaccaataacatgagggctgagatcgaaattctctctggcctctttaatcgctagcgcgattggtccgagttttttatcaggaaccttagtgttttccatgctacaaccttatagagtgtgaaccctatcgggagcttgcgggttctttgatagtgaattggtgccccattcctgacttgaacagaattcgccgggttacaaagccggtgcatcaccataaatgcttaaagggcagggaatagagcctgtgagacgggaaaggaggaggaaaccgttcagcacaggcgaggaggaaagagtgtcatgttgtggaatcgaaccacctatcgctctgctgcgagagcccgctattctcgctttactggcttacgatccagagagcctaaagcgtcaacgcgatataccattgcacgacattggttggaggcggggactcgaaccccaacaatcgggtcacaaccgaaaggcagcatccgggctacacaatctccacacgaataatgccaagccggctgaaagcacatacggaggaatgttccggcttggacttgattggagcagttaccggggatcgaacccggaacaccagattgaaagtctggcgatttcaaccaattaatctataactgctttatttggtgcatctgcttggtaacgatccaagtcctctggaatttcaacccagcgcttctacctagttagcttcaaatgcattgtttggagcggatagacggactcgaaccgacgacgaactgcttggaaggcagacgctctaccaactgagctatacccgcttttattttacactagagacaccataagtctcgcttccttgagttcctgacgacgcctcaactccattacgtaattgggccgcgtacagcaaggacatttgtttcgtttgcgatgatactcagtcttcgctggacatacacgcgatttgatcttcactatgtactcctaattggtcaccccggaaggatttgaaccttcgaccttctgattccaaatcagacactctaaccagactgagctacgaggagataataaggcccgtatcgggcgttcgactctgcttctaaagcgaagagtctcttttggaaattggctgggacggcagggttcgaacctgcgacctgagagttaacagctccctgctctaccaactgagctacatcccaatataaaccttggagccgcgtatcggatttgaaccgatgtgagacggatttgcaatccgccgcctaaacctctcggccaacgcgggctaaattcatgaggttgttaacccgggcccctccgggagatactggatcacctcctatggcttacagcatctaattcaaatctaggagctataacgggcccgagccggacgatttatactggctgccagtagcttatcacagctactcaattacccgtgccagcttaggcgcttccccttaccgagataggtagcgacactgaacccaccacttagggttcctcggagtgcaatttggtagcgagaggtggaatcgaaccacttgtgttcggttatgagccgagtgacagcgccagccagtcttaacgctctcgctatttggtggtcgaaggaaggaattgaacctctagcctatggcgtccgggttacagccggatgatagtagccatctatctctacaacgaccttgttggcgacccatgtcggattcgaaccgacgaccttgccctagacaggggcttgctctagtccagactgagctaatgggcctgtaaattctggtagccagagaaggacttgaaccttcaaccatccgattatcggtcgggtgctctaccaattgagctatccggctatattgtttgttactctatgtacctatattatcatgaatttcttgtttgtcaacccccttcatgataacttttatagcgccggggaggtctgaaagcagcgctaccttcgtcagtcccctagctctctcactacttggccgccatagaccggccttaagtgaccgggtagggactcgaaccctaaccaaatagcaaaagagattcttaatttggtggccccggagggacttgaaccctcaatcctctcggcgtcagtttctaagactgatgtgtataccaattccaccacagggccttaatttggcagcgagtaaaggagtcgaaccctcaccgttcatcacagcggcctagttttctagactagttcccgacctactcagggctactcgctaagtatttcttcatctgataagtgtattaaaacatgaaaaattcagtttgtcaacacttaaaatcacttattttggcagtgattttggcagtgagcagtggtctcgatccacatccgcgttagcagacgtactccttagcagggagcctcagaacctatctgatttactcactaaatttggttggacgggtgagactcgaactcactataagtctggttaaaagccagatgctgatccactttagcttccgtccatcttaaatttggcgctcgtactaggactcgaacctagaccttacggcttagaagaccgttgtgcatccattacactatacgagcaatttgtgtcactatacaggagccttactctcctgtcaacaccaattggagagaataccgagtctctaaagaacatcggtcgctagcagcatagcctagctctccggctgcgaacttggtcccagaaggattcaagttccatataatttggcgggccgactccgattcgaacagagaatacgaggatttggaatccagtaggttgccaattacgctcaccgacccttaattctggaggacatttcttactcgctgtcctctgagcgagacacattccttgtcgggtgaatgttcttttaccacatttggcagccactgatggaattgaaccatcatctccagattcaaagtctggcgtcctaccattgaacgaagcggcaattaatcaaaacgcgagaactactccgggagccttgtcctcttcagtgttctcattatctcctgattctgttccttttgcaagctcttttttgagtgcaatgtcagctttgtagtaagcgacgaacatatcagaaagctctttcttgagcttgattctcatttgtagagaaacctcaggattgtcagattgctcttgtaggaacctaatgttctctgcaaagctcttctttagaagtctgagtcctgcttttaggtctgtttgaatgataccccgggcttctagctcggcattcgtagggcgaccgcccttgtttctttcttgagtcatattaaatcctctgaagctttgtaagccccatatactccgattatagcacgaaatctcctgttgtcaagcccttaaagaattattcgcaccgtaatctattatttatatgtattgtcagagtacgcgcactctatatacaatgtcagtccccggtagggagaggagcggtaactccttcgcttggataccaaccaccaaaatactcatgatccagtgtaggattgagagcaaacctacggcaagaggagcatagatcgtcttccttaccagtatgtttattgatgactggagtctcaaacgagagttcgctatcacagcacttacatctcatagaaattccttatgggttgattgatggattatctgtggtgggtatctggtgtatgtgtatcaggagaacaccccatgcagatagattcggctagggaaggatagagtcgtcccaaggctcgccatacagaatttaatctgcctaagacgtgccttggctctatccaattcctcttactcatgcagatgagttcggtgaggggcagcatgtaggctgcatcggattgctgtcattccgctttcgcgtcgtctccaccctttaacagcattcgagttcaggttgcccttgtggattcctcttcataggcgctaggcgtgggccggtgagtgctttcagacatatctctcccacgctgaatattgataataccacagatttcctctatgtcaagcctttaccagaacaaaatgggttgacattcctgagaaacgtggtattattgtaaaacactaacccgcaaggagtaaaagaatatgcaagttatcaatatcgtagaatacaaccctatcgtctggcttcgctcgattcacgcccacatgaaggaaggtttccgtgtcgttcggtcgattgaaggctatcctgtgtacggtaccctctgtcaagtgcagatgttccggcaggaaggcgtcagccctgagattgaaaaagagcttgacggcaatgaggtcattgtgcaagaatgggacgttttcagccttctgatgggcatgcaaaatgctttcgatcaaggtttccgcattgatctcgaagaccctcatttcgccaatatgaatttcgctctcaagtctgtaaagatggtccgagaaggcgcagagaagcagactgaggaaaagtctacagaagtagctaaggaagttcctgtagaggaagtccaagagactgaatcggaagataaaccaaaaacccgtcgtcgtcgtactacaaaggagaaaagtgaatgaagtttaacaaagcacaacgtgagtttttcaaagactacgcaatccagactgtgaagtctaccctgatgcaggttgcagcccagaacggcctagagatcaatcaggaagctctggatcgcgctatggaagtcgtaaacctcgaacctctggcggaagcagccgggactgcgttcttggaacgagtagactttaaaaccctcgtcaaggttgacaagtttgtacgcactgaagagttcctgagtgtagctcaggctggtgcagaagttggtgaagctgtcagcggagagctgagcacaatcctccttccattctttgcaatgctgggctctggccagaaagaaagcgaggagtgattcagtaataagggccctttcgggcccatttttgtaaaggaggtattatgcctgtttcatgtacacaaagtgttagcaatcgttactccatccttctgccatacgtaatcaagagcctcgaagaactcacagaggagctttggacccttgaaaatgcaggtcagaatgatgaagtgtacatcaccattaacggatgcggtggacaggtagagaccgccaacgctataatccgagcgatcaaggagtgtcaagctccagtgcatgctcgtctcgaaggtgagtgtgcgtctgccatgactgccatcgcgctagcctgcgactccgttgagatcgaccagttcacatatttcatgatccacgcgccttcttttggcgttgtatctgctgatttcaggaatagtctgaggaatgcagcgtttagctcagcgtggtgcgataaatgggtagatcacgtctacagtgacttcttgactgagaaggagctagagcgtgtcaaggcaggggaagagctttacattggtggcgaagagctagaagataagctcagtgacttctttgaaaagaaacgccttgcaatggaagaaatttcagagtagtatcatcaggccgggacagtagtcgccggccattttttcggccaaaggaggatatacaagatgttcgaacttatgcaggagttggagggtcaggctattgacaacagtaaagaaggcgtgtaccttcagaagatcagaaaggagtggaaatatgttgaggattacatccatgctctggaggaactggcgctgtcggttatgccttccgagctgctaaaagagattcaggaggattgcggagtatgagagacgagtttgaagcgtggttcgtgcgtaactacgcggcccaaattaaggatgggcaccatggcttcacccttgatcgatatgagcatccgccgcatcaatacatccacgacacaccacatcatgactggcggatatggctcgccagccgcgcggctctgagggtggagttgccggagaaaatggagcccacaagaaacatctacggcaacctgataatcggcagctacaacgcagtgcttgatgccgtgaaagaagccctccagcaagccggaatcgaggtgaagtgaatggcgacgcgaacagttcactacgacgagtgggacggcggcacagaagcggacagtgaagaaccgtatgacgtcttctgtggcaccgatggcgacttcgaggagaagaacttctcccgctaccgcaatcatatcacctgcaaacgatgccttaagttgctggacaagaagaaggaggctgcctaatggacaccaacaagctgaaggaggattactaggtatgaatagtgtatgggtgatatttggacaactctgggacgactacagtggagagttcgatctccacatgcttggggtactgggcaataccaaagcggagactatccgcagggttgtatcgtcctacccgggcttgccagaaccagacgaggagcttcttgatttcatcgtagcgggcctgattgtaaacgcagagtgtgaagtagacattccgtgcgggaagacaggaaaagacgagtgggttatgtattctattcgtaagaaggaggtgtaccaatgagtaacctagtgtgggaacttgtatgggaagaagattacgagcctgacagtagaatgggtctgtggattgggaaccctccgagtgtagagcagttagctgaagtactcctaggtgcggactggagactgacagaggacaaagtagaggaggccgctcgtagccttctgaagagcggtggttacaaagtgtctcaataccactggctcaaccttgacagtttctttgcagatgatggcctaggggaggaggtagaaattgacagcgaagaaccctgatctttcaactcagatgattgataaaatcattgcaaaagagtcggtagtgggacagtatacagtggctaagcagaaggtgaccgtgattgactatgaagagttttcacgtctggacttccagcccccggccacttggttcatcaaggatgcatctggctactacatctttgtccacacgtctcagcgagctaaggctcaagcgtggatagacgaagagtatggcaaaggacgttacaccgtcaatgccagccgagtgcagaagaaacacaacacgggcgaggggagcaagccagcttacggcgtagccactcgtcgcggacagaagcgataggaggaaatatgaaagtagtaaaacgtaaaggtcacaagttggagttggagagcgacgagatcaatatgctggtaggacttcttggtcacctctcggcttcggctgcgaccacggacttgggttggtttatggaagacctctaccaagagcttgaggttaaaagtgatccggaggcggtgaataaatacgagcaggagtttcgggcaaaggcctacggcagtgatgatccctcggacttcgttattttaatcaagggtgcagatggagagtacaaatgaaggacgtagcaggaagggatatcgagatcggcgacgcagtagcattctgcctaggcggaactggaatggttatgctggtaggcgaggtggttgcaatcaatcctaagactgtcagtgttaaagctgaagcgtgggacaagtggagcggaaagccatcagtgcaagtgttccttcgccggggcgatgccgtttgtaaagtagaaaactaaggaggagatatgactgaaccgactgaacccactgtaatgcgcatagacgatgtgatcgaggctctacagactcttcgcactgtgtatggcaacttgaaggtagcggagattgaacacggagacccgacttggagctattacccgcctagcgttgtctatttgacagacactgacgagtactacatggaattcgcgtgccctgaagaggggtactacgaggagatcgcggttctaattggaggctagtcgtgaaggtcaagcatattaaagcttacatggaggccgctgaggccttcgctaagtgcagcgactcgactcgttccaaggttggtgcagttctagtaaaacgtaaccgtatcatcagttgcgggtataatgcccttccagagcacctaaacgggccgctggaggacgaaacgggagtaaccaaggcagaggtgaggcatgccgaagaaaacgcactgagggctcttatacgcagccctgagagtgcccaaggggctaccctgttcgtcactcactcttgctgtaaaaattgtgctatctcggtggttgaagctgggatcaaagtagtgtactataagcacgaatatcggctcgacgaaggtcttaggcacctacgggagaatgatgttcttgtcatcaaatacgaggaggatcaatgagttattttcaacgactgtatggactcgacaagaaaggcgggttcaaggagtggactgtagaggtggccggagaggaagacggtagcttcaatatcgtcgtgaaatacggcaaagaacatggagccatgacctctcaggttaccaacatccgtgcgggcaagcagaaacgctctgtagaggagcaggccgtgtctgaggctcagtccaaggtgagcaagcagttggacaagggttatcgtgcaaccaaggaagaactcaacgatctgccggtaatggctatgctcgccaagccgctcgatcctgcgaagtataaagcaggctatggttctcctaagctggacggtctgcgatgcatggctaagaaggtcggcggcaaggtgacgctagcgtctcgtatgggcaagccttacaacgtaccgcacatcatcaaagaactcgaagagatcatgcaagagggtgatgtgtgggacggcgaactgtacgtccacggtgaggtgctggaggatatcaactcggcggtcaagcgagaggatgcttacgataagtggatgaaggccgagaaagctcttgaagcttaccctctagagaacggagaggaggagtatgatcgtctcctgaaggaagtggacagcacgtcctttatttacggtcttcgtaagcggatggagttccatgtcttcgatatcgtaaaagatgccttgacatttaaggagcgtctggtagacttccagttccagtctgcactacacagtggtctggggagcattcgttttgttgagtacgtattctgctccacctttgaagaactgaaacgtcttcatgatgtgtaccgtcagaacggttatgagggtatcatgtggcgcagcccagagggcttgtacgaatctggtaagcgctccagcggtctccagaagtacaaagagttcttcgatatggaaatgcagatcgtgaactacgtggttgacaagaatggaaacgctgttctggtggtgttcgaccctgtacctcaagagatgcttgaggtgacgtatggcgactttgaagcccgtaaagaccagatcactaattttgagaactaccggggtaagtggctgactgtgcaaattcaaagtcgtttcaaaaagaccttgcgtgctcagttcccaactggtaaactaattcgcgctggccgggtaatcggcggtgtatttgtccctgaagaataaggaggatatagaatgttcaacgctaagtctgtcaatgtgaccactgcaatcgaatctgctgagaaattccagctcttggatacttctgctatccagattcgaagtgtcattcagttcatggatgctctcacttacaaattcaattacatgactgggtgttttgaaactgaaacccggggagcgaagcacatcagtaagctgagtttcaacactgcggtgcgtctgcacaacctgtaccttgtacctacatcgacggtgacccagtacggcttctgggccccggctggtgccgggtatcggagtgcagaattcatcgatctggttgtaagtccagagcttatggcaaaggcgcaggctagtaagattgtgaaaaatgccaaaatccagaaggatcgtaaaggcaacattcacattcagtcgatgatggtcgagttccccaacaaagactacgcccgtcgttacaacttgggctgaagtataatagccgagtgatatacagcccgcccacaaggcgggcttctttgtctaaggaggtgttatggaaaccttagaagctctcgttttgtcgatccttctagccttcattgggatgttcctcgacatggaatactctcgtctaaaatacggcacggagcctgtagtggaattccaagccagtcccggtcaaatcatagaaagcaagcgcaccttgtgtgagtacagaaagccttgcaggttgttggctgaagctgtatacttcgaggcccggggagaaccggagatcggtcagattgctgtagctcataccgtagtgaacagaatgaagcacgacaggtggccgagcacagtagccggagtgctctacttcaagtgccagtattcctacacctgcgatgggagtatgcggcaaggtgtcaaggagcttgacaagtgggaggcagcgaaacatgttgcatacaacgccctatatgggtatactgtcgatccaacgagaggagccgatcactacctcaacgagaggaaggtgagacgggctaataatggcaagcttcctcggtgggctaggaaatacaagcgcacaatcaagataggcaaccacacattctacaaaggagactaatatgaacactcagcttggtatcgctattgagatcgcactctcggctcacgaaggtcagcggtacggagagaccaacttcccgtatgcttaccatctgaatcaggtgcatacagtctgcgtggcccgcaacgctcctaaagatatggacccgggtcaggctttctccgaccttccgtacatggacactcttctcgctgtgtgcttcctgcacgacgttctggaggatacagagttgacagaggaagacttggagtccatgggcgtgatgcctcacatcgtagaggctttggtcattctcgataagaaccgtgctgagagctaccgtaagtatatcgaagcttgccgtaatcatccggttgcaagagaagtgaaaatttgcgatactatcgcaaatcttacaaattctgtgatgagtggtaactcgaagcggatcaagaagtatagcaaccaactgagcatgctcgaaagggaggcatcagttctggaaaacaaggcacggaagaagacaactcgttccgacaaattcaaaggctatgtaggagaacagtacagtgtggaatgaatataaagaacagtacagctacaccccggtcaccaccgaggagattaaagaagttcttgcaagatgggagttcattaaattgcaggctgagtcggctgtagaggaagccatcaacaactattctcgtccttactctttcttcgagaagttgcggggtgtagacaagtggtctccgaaagagctactgaagagagatgcagtggatcgctggctgggtgtcgaagggcatctgtaccgagagggtaagattagtgcggaccattactgggtagtagatttccactacgagcgtcgggatatgttatcagagttcaaggctatggctagtatggagccggagcgtgaacatctgctgggaggggccgctatgcgactcatccgcaggattaacaaaatttacgaatttgaaatggaggcataatgtctgtatttttctcttccgatctacacttcttccataagaatgtgatcgagtattgcaaaaggccgtggacttttgaggagcaaaccgaggagcttatttctcggtggaactcccgggtaggcctttttgacgaagtgtaccatctgggagacttcgcatttgcaggaaagaacaagctacagcctgtgctggatatcatcaagcagttgaatggccgtatcaccttcctgaagggaaatcattgcgactctcgtctgtggaagttgatcgctgatagcaatctctctcacgtagaagacattcgtgagtacaaggagattcgaattgacggagttaagatcgtcatgtgccactatcctttcgagacgtggaatactgcccatcatggagcttggcacctgcacggccacactcacggcagcctgccttccaagggtaagcgccttgatgtaggtattgacaatcacccagatcatcaggtattctcttacgacgaagtgagggaatatatgcgagagcaagagtttgtggttgtagaccaccataaataaaaggaggaaagaatggtcaatgtgttgatttcgcgtgacaaggaggatgttaaacctaaagctaacactctggtggaactgatccatgacgacggagttccttttatcgtcctcatgacttctgatgttaaacaagacgggacttttgaaggagtggctttcgaggacgcccgctggacggatcagtttgagatcgctcaattccgagtattcgatggcaaagtaacgctgagcaataaggaggactaacatgaatgatccggtcaaggatttcaagaaaactgtaatggttgttgctgcacactacatcactcagtctgggctgactcaacgggaagtggcagagcggtgtggaacccatcagagccgaatctccaatctgatgaagcagcatgttgacaaattctctattgagagtatactggagatcgttcacaagctcggaggttataagatggtagcctccatggaacttgaagagcataacgtacttaacttcaacatcttcccggaggaacaagcatgaagattgataagaattcgtggcatatgcggctccatcgtacgttcgagaccccggtctattcggctatctcaagcggttggcaaattgtaaccctctgctcttatttctggcagacagtattcctcgtcgtgtggctggcgttaacggttgtagcgctcgctgctgttgtaggctctgtattgtattctctggctctcggtccacttaccggatatgttctaggtgggactctggctgtcatggggtttgtatggattggaatcatcgccgtcttttatggcgtgtgggttttctaccgattctctcgctttatgtcgagtaaatcgtccagcaaggatgggattctggtatcgtatctaaaggcaaagaaggctaaattctgcccaattgtcgaattgaaataaggagaagtaggatggaaggtaatctcaacattgcaatgtacaaagacctgatcgctaataagctggtgactgttaagcacttcaacggtatgtcgattataaagtatgcccggaaggtgttctacgagaacctgtggaatgagcatccgctccttctggaggcacggggtcatgtatttgacccgcactccggtgattgtattgtacgccccttcgagaaggtgtttaatctgggagagaatggtgctgggagtttcctccatcctaaattccgtgtgcggctgattgagaaagtgaatggattcatgttctccgtgactaagcacaatggctcccttatcttcagtactacggggtcattgaccggcgattacgttgcccttggtcagaagtatgtgtcgaataacccagatgattacatcgcaggcttcacatataacttcgagatatgctctccagacgaccctcacattgtcgaggaagaagaaggggcatatttgatcggtatccgcgatatcttcactgggggccagctttcagaatatattcttgactctcacgccctaggtgtaacggaccacagttctgtaaagattcttcgtccagagcacatagagtgtagctgggaacatgcaaagggtcttctgagttcttgtgagaaagaaggttacatggtacaaacagggctagggacagtgaagtgcaagtcaactcactacctcggcaagaagtttatcatgaggatgggtagtaagaaggtcaatgcgatgtaccaagacccggctggattcaagcagacgcttgacgaagagttctatcctctggtagacttcttggtaaatgaagtggatgaggctcggttctcagaaatgaccgatgcacagcgacgacttctgatcgaaacctacttcgatatggctcgaatttaaaggaggaagtatgcaagaaaagatcgtgtatatcattcgaggactcccgggctccgggaagtcctctcttgccgagattctgtataacaaaacttgggagtcaggccggcaggcgtctatctgcgaagcggacgattaccaaatggagttcggcaagtatgtgtggaaagctgagagggtagttgaatctcacaaaaagtgcatggacaaagcgcgacggtctatggagataggactagatgcggttatcgtatccaatactagtacccgggagcgagaggtagcaccatacattgacatggctgaagagtttggctacactgttatctctctgattgtagagaatcgtcatgggaataagtctgtacacgatgttcccgagagcacgatggaagcaatgcggaatcgcttctctgtgaaactgtgaggaggatgtatgattagttatgctgtaggttgccttcaggaaatggaaggtgttatgagccgtccgtggcaagaggcaaaagtgtggacgttcccgggcggcgaagtgggcgttaatgtgggcggcatcgaaagccatgcgttcgtaaacgttaaagctcagattcagaatagtgatgatatcatggctcttctcaacgtcaccgaggcgatccgagcagaaatgattaatccgcacatgactcttctgctgggttatgtcccgtatgctcgccaagaccgtcggtgcaatccgggcgacgccttcagtttgaaagtgtttgcaaacatgctgaactctgccggatatgaccgagttatcgttgtggaccctcacagcgacgcaactctgcacctgattaacaacgtcgaagttgtccgtcaatcttcggtcttcggtggcctactgagccgttcagagtgggagcaatatcaactcgtagcccctgatatcggagcaacaaagcggaccgaggattttgcaaagaaggccggagcagccgctgtaattcgttgcaataagaagcgcgatctccagaccggtaaaatcgaaggctttgaaattctgaatccttcggatatcgatcctgaacttccgcttctggtgatcgacgatatctgtgacggaggtgctacattccgaagcgtgtctaaggccctaagagagtacagtaaagtgctccctgacctgttcgtcactcatggaatcttcagtaagggtatcgactgcttgctggattccttcggatgcatctacacctcggatacgctccctcaaaaagagcacgaagcgctgactgtcattccggttgaatactccaaggcggaacgcctgtgagcttgagtatctggattgtagagtataagcgttcggctccagagaagagggttgtcaaggtggaggagttcgacaccaaggaggaactggacgctcggtacaagacgatgcacgataagttttgggaagacttccacagcaagaagcaaccattgctgcgccttccatgcatctaccctgtgctgacgctgccagtagaagaagtcgaatattgacaggaggcccagattgatgtagtctgggcctattcaacacaacaggaggaaataacatgaaaattctgccgcatctttccactgatgggtacaagattggacacggctccatgtactcggaaggaactcagcttgtctatagcaacctgacccctcgctccgataagatttatcgaaagacgcatgccaccgacttctacgacggcactctcaagtgggtcggcggacgggccgcttggatggagatcgtagagtcttgggaaggcttcttcgcggctgaagaagagaacgccgttggccggtattcccggttcctgactggctattttggccgggaaatggaagccgtggagcagcttcgcgcccttcacaagctcggctatctgcctctggaggttaagtctttgaccgagggcgttagcgttcctatgggcgtgcctgtgctaactatcaagaataccctgcctgagttctactggctggtgaactaccatgagaccctgatttcggctatgacttggaagaccgcaaccaacgcaaccattgccgcagaatacgcagctatgggccggtactacgcgaaccacactgggtgctacgacgacttcctgctgtccgttcagtttcacgacttcagtgcccggggtatgagtgggattgaagacgcggcccgaagcggtgttggtcacttgacctcgttcgtaggctcggacaccttggcagcggctatctacgccgaggactactatagcgcgactggtctggtagcttgctccgtacctgcgactgaacacgctgtagctactagcaacatcctccgtattgagaaagaaatgcaggatggggaaggtgaaggtggccgtgaggaagcagaacgtcgattccttatcgaactgatgggtaagttcccgagtggtattctgtcgtacgtggcagacagcttcgacttctggggcgtgcttactgaaattctgccgtccatcaaggatcagatcatggagcgtgatggcaagctggttattcgtccagactctggtgatcctgtagaggttatctgcggactgggtgatattgaagttgtcgagtcgctcgaacactgggatatcatggatgcagtaaatggaaacgatgcatttgttctgaactttgaagataagtacttcaaggttattcccactgagtgggatcaatacgagtatgtaattggctacaaactcgaagaagtgagcgaggcgcaggtaaaaggagctatccaagttctgtgggaaaccttcggcggtactgtgaatgaagcaggttataagatgctcgattctcatatcggtttgatctatggggattccattacgactcgccgagcagctaaaatcttggagcgcttgaaggagaaaggtttcgcttccctgaacgtagtgtttggagttggcagttacacttaccagtgcaacacccgggatactttcggattcgcagtgaaagctacctacacggaagtgaacggtgaaggcattgcaatcttcaaagacccgaaaactgacagcaagaagaagtcggctaaaggtctcctgaaagtgtaccgagacctgcaaaatgggcgattcctccagttgaaagataatgtatctgaagaggaggaggctactggttccttgcggacgttcttcaaagacgggaaatgggacacggaagatttgaagaacaatgatctggaatctatccgttatcggattaagaacggcgtataagaggaggtgagtatgttggctaaatactattttacaaccttctgcgagcaaggccgaccagagaataaaggacatagattgttcaagtttaaaatctgggagaaagggtactggtctccattcgcagcattagactcgatgtacgataacatcagagccgatgcgagaggtttggatatcagatacacaagtgtagagaggttcaaatgattaaataccgaaagggcgacctgctcgccgcgttcaaaaacaaagagttgcacgctattgcacatcaggctaattgcttcaacaccatgggcagcggcattgctaagcaaatccgggagcaattcccggaggcctacgaggcagaccaagcaacggtgaaaggggaccgaggtaaactcggctccctgaccttcacaatgaacgagtacggatcgatttataatctgtacggacagtacaactatggccgagaagagggtcgagtctacactcagcttgacgcactgggccaagccttgtacactatgtctctgttccttgaggcagaggctgacgctcgggcgattcctacctcggagttgtgtgtaggtctgccgaagattggctgcggtttagccggagaggactggagcaatgtcgagcctcttatcgaggagacgctcgaccagtttcaggtatacgtttacgaactgtaataggaggagatatgatccggggtgcaattaagtataaggggacttggttggccccgggctcggaggctttccagctttatcaggataaaaagctagataagctggataagcatctagctaagctggacaaggaattcaaaaagctagaagggagagagtgacatgtctattgatctggacaacttaacagcgtacgaacttctccatttgcaagctcaaataatcgagaaattgagactcaagtttgaagagtctggagaaggtgagctagagataaaagacgtgtaccggggaatgctcttaaccatgagcagcgatggatacactgttcccagaggatgtgaatgcaaggtggtgagtatagactacgaagacaacttctatccggtgttagtggagtacaccaaccaagaaggggattatcgtcaccactgggttacatacggagaactgggacaaatggtgagacgatgagatattatacaggagtcggaagtagagatacgcctaacaaggagtggggcattctcagagagctaggtcgtaaactagcggaacgaggttttattcttcggtcaggaggagcgaagggagcggattcagcgttcgaggcaggctggctggattatatatccaataacaaaggagggactacggcagaaatctatctgccggagcccgggttcaatcagtatgtgataactgagactctaggagctacaatccttccagaagaagagtggccggagcagtgggaggaagctgggagtattgctagccggatacacccagcttggaactctgtcagaaatgatggagagcctgttctgagtccattcgcaagacgagcccacactcggaacgttttccaagtgctgggaatcgatctcaacacgcctagcaagttcttggtgtgctggagcaagacagaccacaacgggattccagaaggcgggactaggaccgcttggcaactggcgtcctctagaggcgtgccttgcttcaatctgtaccgccatgcagacagagacagaatcatggcgttcttgtaaaacaaatagaggtacaatcatgtatacagttgaggttccagaggttccggtagtctgcgatatcacagacccaaaccgcaggtgcatgcaatggattcgcgctcgaatcatccgacttaagaacaaccagagtacagggttcgaagacatttacgttctagagcccagtcacgttgatctagagtgcagatggcgagaagagaacgaccctgaagattacgtcagatgggtcgtggcgtggttcgacgtggatatgtgcgacgggcagaagttccgccagttgattcgatacgatatcaacaacatgttcaagtggtatggacctgctaacctgacatgcgaaggcgtgttcactatcgagaaatctaaggtgtgccctccgtatgttgacatgtgaagagatcgaggagctaaagtctcggataggggcgaatgctgatcggttgattcacaaggtggagagggggcttgttcctcctctagataccagcagagggcgaaagccctctttctttttcaacgctgttcagcctgaaatgtacgaagtcatggtcgagcttgatggagactaccctctgtgggtggacgacgttctccaaggagtggccagacttgattggtacagacctgacgaaaggtcaatccccctctctgcaaagaagctcttgacaatttttgcaagtcttagtaatatcaacgctcacacgataagccacctccttcgagtggaggcaagacaggctaatcgctactacaaggctgcggaattcgcacatgagaaattgattgacgggttctgcaaagatgagctaagatgcatgaagtatccagagacattcgtctaccccaagccggatgttccccagacagaccaagaggagggttagtatgttcaagaaactcgtagctattgcgtttacactcgccctgcattcgtgcggggtcgctcctgcttatgcagaggacacttctggccgcgatgcagaatactgctcggctgtagttgcacacttgacaagcatgccaatggaggctatgctctctgctctggatgttcgtcccggggatgatcctgttatccgagtagcaaacaccatgtatatctatacatgcaaggtggagggcaatctggtgctggtcaagggagactttgagaaaggcttctatcgtgcgttcctcgtccaagaggacgaatacaattactacatcagccgggaggaaatgctgtgatcttcgacaagtatattatctctctggatacgttcaaggatggatcagaagagtacgcgctttttagtaagggtatcaacgggttcatagcgtacatcgccagctttgcaacgaagtatgcagctattgaccatgcgttcttcttggagtataatcgttacccatcagcttacgaggaggcggacctgtacaactgggttgtgatgtgttgaccgaaggtcgaaccaaaaatttagagccctagtggggctctcaaaggaggaaaacaatgaactctaattctattgcacctctaatcaaggagggcatgcgggcattcttcgagaacgaagaggaaccatacatgtgctacattctggagagattggcactgtgcagtgactccagcgtcaccgtctcagacgtgggacgatttaaggggtggctagataagacctttggaatcgggccgcttaactcggtaatgcacctcttggacgaagtagctgattcatgcgtgttatccatgttcgagaataaccctccgaacaaggactgggaagactattgggaaggctgggccataggcagagcgtggtgcaacttctacgtgtgggcctactgcgacttgattcgaaaaggaggggagtaatggagataatcccaatgctattcgtcctctcgctcgcgtggggaattgtgttcatgtggacctacatgggtatcacggagtatttcaaagataacttcccagctagtgcgactaaagatcacagagagggtatcgaggcttttgccattgtactgggactgctatggcctattacatacacagtgtatgctagctttctgctactctacgcaacatacagcgttttgaaagtggtgttgttacctaagtgggctctgtctatctggaacagccgtaaactacttaagaggatcgcaccatggaacaagtagggcttctcattctcgtatgcatagtcgtcggagtggtctgcctattgttctactctgtgatagggatgttcgtatgggaatctctacgaccccttcttgggtggaggggagaaagtacggagaggcgtaagaaagaggcccgagcggtgttagctggaatattctggcctatcgccgtaccgtttatggctatgctattcctcgttagtctccctagaaaagtgtggagactgactagggtagctatcacaggagaggaggactgaatatgtttaagaagctgttcgcatggttccgagaggaagaaagtaacgatgagcctaaagtgttggagtctcgggctgaggagtttcaggtagaggagtgctatgatccagcctcccggcctgtaaagtatataaacgctaagcagattaaacgtctgaaggaactggatgctaaggtcggagacccggttaaggctatttgtgctacattcttcgactggaagcgatggatcgtagaccgcaactggagattttcgatgatggcccaccgtatcgatgagaaggtgcatattacagattctaagaccggaacagtgctacagtggagagctaccgcagactcagacctgataccggtaggattcctatggagagatatccccttggtcagggacgccgctgacctcgtactgaccaatatgccgtggatgacttcggaggaaaaagaatacgctgcccttatggctaggaaggctatcgccgctttggcagataagaaggactacatcgacaagctggtagcccgcaagcgtagccgggataactacaaggctggtctgattgaccgtgcgttgatgatggagaagtatgtaggagtccaagaaggcgatgagtgggatatcattctaaaagaggctagagagcgtctggaacggtctatccccacagagagcttgacaatggactgggaacgttttacactcccataaaacacagacaggaggaatgaaattgaaagagcgtttggtgaagttttacactattgtgaagacccccgaagagaacattgcagtacaacagcaccttaaggcttatggtatcgagtttgggagcggaaacggcttcatgtacgacaaggctcaagtgctactgtgggttggagataatctgctggactacactcgtaaaagcgacggaagtccaatgacattcctgtggtacgaggaagaactcaaagaggccattggatactcgaaatcgacctacgacttccgaagggtagacttccatttcgtcactgagaagaaagtaaccgcgtacacgcttcatgagtgtgacactggtcctactacagagctaaatggcacctacacgcttcaagcgttgaaggaaatcattgcagacatggaggaagagaatgaaaactaaagagatcgatgtcagcaatttcactgccgaacagtttgatgcgttccttgagtactgtcagtacgctcaattgaaggtaggagagggcgtcgttgataagatcagggagtggatggaacaccctatctccgtagatgggccagacgatagtccccggtgcctgtacatccgggatcattccgaagaccggttcattagctacggaacaggcctgcgaagcaagtggcaacccgatatgtacgccttgtataggcctaccttccagactaagtgtgtgatgactctaggagaggcagataagtatgtcatcgtgggcggtaagcccctctcactggatgagctacaagcaaccctagccaagcaaggcgtgatcgtaacgttcgggagggtctaatgtctgagcaatattggtatccagcccctatcgggtgcatcaaaagcctctacgcagtagctttggaggcttgggccagagacttctggggaagtgaaaatctaaacaagattctccgtcataacggattcagtccgtgccagagcatggagaaagtgttgcaatacatggaccagataaacgaagagtattgcaacctcatgatgaactacgccactagggagtatatggaagagcagaggcaactggaatctcttcatacataaactcaaggcaataaaaagccccggatcagctttcgctgcccggggcttctctttaccacgcttatggtctagctgttgtcaatctattccctacacctaccctgtacacagcggcagccccttctactccgagtgcgacaatagcttcgtatacagttgcgaatttgccacctgcactagctgcaagcggagcttgaatattatcttccattctatattccttctatttgtggtgaatctatacaaccatcgcttatccagctataatgaagaataagaacatcctataaggattatagcacgaaaataggaaataagcaatgatggcatttagccgctaaaggtatattcgaatcctaaacccccgccgaatagagtgatacgtttgtagagtgtgcctcctctactgctgggaaaataatggagggagcgggcctaccctctgctggttcgccttctgccagttatggatttatttccgagctacttaaccacgaacccacctcgctaccctaacccctagtaaattcaaaataatgggtggccgtggtctttccttcttagcgacagctaagctatgcaaaactaatgccaacgggctcccgccctgcccggtgaaatctttccacatgttggcatggaatatgcatatacatttgatagcttcgctatcggagttcccgcacaagagttctcgcactctcagagggttgaccatcgaccccatcaaatcattgcaaaagggttgtctcttttccctgtgcaatatccttgccaagtttgtccactctctcaagcaacgcttgaacaacgttcacactgtgaacatcctccatctgatagagatcgatacattcgaggatagctgctaccttggcatgttgccatgccgcatgggcttgcatcggatcgtcgaacgatccaagggtagactgctttccaagtgtcctacactgagcaacgtatacaggcatcccgtacttgtcatagcgtgctaggcggacgcctagagggatatagctatcccacgtattggcacggttattgcttgtcttgtcacagttggtgaagagtgtatgcatgtatgtaggcgtgaactcgcacgtatgcggagcatagagcttgtttcccgggaagaggatattcttatctaggcggtagcctacggcgtaccctgacacattcaccacccaatcatagaacgcttcaaagcctgtcttgggcttggcccattccttgcatatctcatcgcctgcgatgacacgtttacgcatggcgtagtagatttgcttagcgtaatggatgtgaatcttggcatgattgttgcttgtcattgtgcctccttgtgtgaatgttggttactcgatagcggcagctatccaccttttagtttaccgtgtttactgggctggagtcaatgttttcagtgtcaccacttccggtcgcaatatactaaagggtagagcctacacttcacagaccactttgaaagctccgctttcgagggttacccttgtcatgcttatgcaattcgtgtgccatgcaaaacaggatagcggagctatcacagggtatactatagcatgcatccgcatgcaaagtgaagtcacttctgaggcgcatgatgaactgtacgcaattctcattgcaaaatgagaacggatgtaagctgtcgcttaacacaatcggggaaacgttaacatcactgagacaatggtagcgcggaaaggggttatacccaaaatctactcaaaacaaccaacatcctatgctaatcgcatatggccctaaaacctcctacaagcctcatactgtaaggctcccgccttgacggtgcagactaacatagcgaagctatcgcttcatatacggcctcacaggccgcttaaaaccgataggttttaggtgggttattgtggggttatttgataggagtgaactggacagaatgctatctgtacagctttcgctgtcatgctgttatacatgtaacgttaacgttacaagtggtctatcttgtcatgctggtgttacctctacagagtgttacaacattacatgttaattacacttgaaagctccgctttcgcagatagaacaaagcccgcacaaggcgggctgttagagctttaatggattagtgcggtttagtgatggcggcggatgcacttagcttcatcgtggagattgcggatgcgctcggcccaaggatggccagagaactgatacccacgatgttccggcaggagcatcaggcggagggttgcacagcgttcgttctgtaggcgtgccagagtggcgttcatgatctttcctcgattaggcttcagtgaatggttagcgacgaagggttgcgagattggacccacaatgaccgcaccacttcttacctaatgcgataacccaatcgtgtttgctgttaccgccgttgatggctccacacttcgaacaacagatttgaacgtttttcatggtctttcctcggtgcgctcggcggcacgttccacgttacggtcatgcgccatacgtgcccatactgcggaccaacgcgttttatcggcagcgttgggcttgtacacgtcatcagggtgcggtggagggccataggcgttacagctttcgtcgtattcgtagtccatgttctttcctatgagaggccccggtcacccggggcttgttacggattgattacttgcgatacttcttaatcaagtcgtgagccatgctaatggcgtcagagtaggtttcaccaccagcttgcatttccttgacagccttgttacgcagtgcattcaatttgtttccgttgatggtgcctttttcatccttgacagcttcacaagcatcgcgcagagttttcagggcttggtaggttgcttgcatcgtcttttacctattcagttgctcagggtgattccctttgcttgatggccattctacaggaatggcctaagctgtcaacaactttatttgagttactgtttagggtaaacggagccccttcccgtcggagaataccaccagattcccgaatccgacatacgtgctagagcttccagcttcgtaagccttcaggcaggcatcaactatagtcatgccatctccgggttgaacttgagtccatttggttttagcccagccgtaccgcccgtagtacccctctctgacaaaccaaaccccgtcttccctgcgggcgtagtcgtagccgtcattgccaatgcgggagaacttcagatttgcctttgccattttgctagtccttctagcttaggagacgccttgtgcgtctcgataggcacagtatagggaacctctagcctcacgtcaacaggtattttccgggttatttgcgctttcctatggccaccagtcgagcacgtagagcccgcttagtcgctcggctgagcttccatctggcggggtctcgcatatccttttcccgctgcttggcggccttgtaggcacgaatacaatctttgtaaggacggccatagccagcacaggcaaagagcgctgccagtttcacaacccgactgtcatggtggacccaacgtgccgccaaggaaaggactggccgtctgccgtcgaaatggcagtattccgcaatgatgttatccttatacttgttattcatttgatgaccctcctcggtcaatgcaagatttgcgttttcaggttgggacgcgggtcaatatcaatgacattctcctctgaggcgaaaaggatcgcccaagcggataggtggtcttttgctgtcatatctttttggcggatatgttgccatgcggtcatgtaactatactcgtcgatctcgttagcaggcatagtatatgccgggctttcaacatcggtaaacacgattcgagggtcagccagataaagatcgggtgactcgcattgaatgtgaaacactcggcaatcttcgtccaaggtgacgattgcgagacggtgattgtgtgctaccgggctcaagcctgaatcgtactcagtatgcgtcgcatagtcgcggatatgattctgaatactctctacagcctccacaaggaagctacggacagtttgaacgctatagacggaattcaagcggataatcagggtattcatgctttctatctcctattgtgagccccggctcgccggggctgtgataattagtcgattacggtttccatcctgcccgggcgacgtattttatcatctttttcagcagtttatttcgagaggctttcatcgacggcggcacttgagtggtaactttcttgctgccgaggatagagatcatgccgtcgattgctttgcactggtaagagtcggtatattggcgtttcatttgtcagtactcctagtaggattttcttcaggctgccagttcgagcattgccacatcatgggcgtctttgaacaggatagcggcttcagaggcactatacccgcgttccaccatgaatgcaatccacttttcactgctacgatcatcgcgggcttggatggtctggcccttgcgcaggtgagcgcaatggttaaccttgatctcggctacgatatactcttggattttgatctggctcatcggggcggtcctgatgttgtttgctggtatgggtgcattatggggcccttttcgggccccgtcaagcattagatacctaattcagcgtatttttccatcttccgctcagccggagccataatcatggccatggtggcattatcagtccagtcggcgatcacttcgccggcgctgttaccgtagattgcccacatagagccgacgatgttgtccgggccgtcgcccttgcggaagcggatgatatcctcgtcggtagattgcaggctatcagagatttccttgatatcggtagactttttcactacccactcgccatcgctgccatctttcacgctaacagtgaagccagtacggattgcacgcattactgccgccatcactactgctttttcagcccgaatgcgcttttggaccagttcacgcgctttgatatcctcgacgagtgctgcacaatcgtactggcggacacccggcttgcggtaggcgttacgcagagcgatgcggaacagggtggcgtagggcaggctagtgccagaggccttgtccatgcgggcgacgtagtgggcgtatgcgaaagtgttcattggcttgttcattggcttgttcattggcttgttcatggggagtctccggtttgtggtttgtcttgcttgagggccattctacgcgaatggcccaagctgtcaaccttttttcagtatcgatccaccagacgcgctatgtgtttaatttcttcctgagtgaagaaattccgcaccttgttcagaatattctgacaagccatgtaagtgtcaaaggcctttcggctatcagtatcgtagtcgaattctccacagaactcctcgaaagtgtagccgcccgcttcagagtcccggataaggctggacaggatacaggtagcctcaggtgctacagccttgatgtaacgtttttcccactctacccgcatcaggatgttaggggccagacggcggatgtcggcgggcatgggaatcgaggctttgcgatgcccgacgcctgtgcggaattcagtgtcgagaactccacggaggccatcgccacggatgaaacttacatcccacaggtcatgcacccaaccttcactattgcgctcacctcgacacacggtggccacggtaacatcgattgacttcaggaattcgtcaacggcggtttcgatttctttagaggaaaggttttcggtagtcatggcttatagttccttaggttttgcctatcggcggtttgtcttgcttgagggccattctacgcgaatggcccaagctgtcaaccctacaaaccgaagattttcaaaatttctttcgaagcctcaccggccgagtcatcccctaggtctagggacaattgctcggtaggacgtggagctacagtttgtgtgaccgaggcggacaatagtccggcgcgtaccatgctagcccattggtctatgctcacctcttggacgcaatcagcttccgccttgcggaatacacattgccggatgccgactcttacatgttgcttgtctacctcatagactctgatccgtgcggtagaatagaaggacagcacatcgtattcatcgccaaaccaatcgtctagctgcctaggggacgtgaaggcgaaatactcaaaatggcgaacatctggtatcccgtcatgctcagggacaggccgctctggagtggaagacgaattcgtcatgcacccgttaacataagggccctcgccgttcttgcactcgattcgataaactacagtcttggcattcatgcctgtcttgtcacccatgatcgtccctctagatcacattatttgctggctattctactgcccttttcgggctaagtcaaagattacgaaaaaccaaaattgcacccacatggcgtaagctggactcccgtaatcgacggcctcttgcatcgtcatcacataggcatcagccataccagtttcccggaagtagtcgtcgatcccgtcagacgttatccccgcttcattcatgatatattgaatgtcaattagcactccgtcgagattccccggcaggtctaactcccgcagacgtatgcacatataccacggcatcccggctgaaattgcgtagtggagaccggcttgaaagatttcagaaagtttcatagatatatctcctattcggggattttgttgtgaatggtgaaccgatgcatatccgccttgtggcgagtctcgataacaggcgtaaaaggcgggaaaacgtcgttctctttgccgtatttcactatctgctgagcatacttctttgccagcgcatgggtagtgaacagggccggctcaaactctggtccaatgccgccagtaacgatgtagcagtgattcgggctttcattacctgaggttcgatcaacgatggccattttctgtatcctttgaggtggggcgcttatgcaccccttggctaggcattctacaggtacaaaaacgcccgtcaagcattatttcagcctaacgggcgatattttacagcattgccagcttgggaagagcatcgacagtggtttcccagcaggctacaggccgcttcgattcgctgtcatactctagcatgatggcacggtcactatcctgatgaatccactcctctagcagaccgtcgttatgagtattccagtttatccaacctagagcatctagcctcacctccaccgggaaggctgcaaactcagccttgagcttggacatttgctcttcagcatgcccagcgtaggcaaagcgttctgcgatgttctgagcggcagcacctgagaaaaactctacggtccggagccagcgcctttcatagtatttcactcggcggacgatgacagcagcacgttggcggtattgtttgttggtgatatgtggagcgatcatggcagttcatcctctgctatcagttgacaggtaaaatcgtagtcgaaaacaaagcgagggtcaacttgaatattgaaccggctaaggtagcgggtcagtcgggcgtcggcattggtcgccacccatgcgtcgccccactcctcggcctcctctaccagccgagcattgcactctgcggcccggcccgggagtgtgtggtcgatgatgtaatcatcgcattggacagcagagcagagggtcagagttaaggctaagatcgacattggagcattcctgttttgatggagattgcagattacagtagttcgtaccgatagtcaagcttcatttggcggcacagtttgttccatttgaccagcaaacgaagcgccgcaggcatgggcagagcttccaccagttcagggtcgccgcctgccatacccatcgactcgctgaagtgagcgcttgtgaacagggtaatctcgccgtcccgctttccgccgacaacccggacgcctttgcaccaattagcttgggtcatttcccttgatctcccggattagatagcagacttagcggcatcgattgcagattctttatactcgaacggaccccaatggtagctgacaggttcgctcaagctagttccgaaaacgctcacgacgtagcatccataaacatcctcatagacggtagcagtacggctatcaccgcttgcgtagtcttcacttttgaactgagctacagcttccatttttgagtctcctaatgggcggtttgtcttgcttgagggccattctacaggaatggcctaggctgtcaagcattattttctgtcgtctttcagtgtgtagggccagcccagcgcttgccaagcccggaatttggctaccgttttaagagcgtgcgtttgattgatacagaatcctagcacggtcacccggtcacctctataaccgggctcagtacggatgatggcccacctctggccccgtttctctgtcgagtaagaggccgtcactggtaacgctcgatatcacgcagagtcttaagagcatcgttgtgccctatgctcaggttaggatgatacccatactcactcagagcgtcgattgcagcccggttgatccctttccattcagcccatgctgcaatgacattcccagtcacccggacactctcagcaccatatgcaacgaatcgggagttatgatagctgatccgcaagatgttgtgtccagctttgtttgcaatgtagcaggtagagccgtggccattcataagatcgccccggccagtagaagctagctctaaggctaggtcgatcttaggccccaaggcctttagctgggatttattaagctgtcgcattaccggtctcctttgtagcaagccgcacctgccgtcgtctggtactgagagggaaaccacttcactccccatgcggtcagttgggcttgtagttgccttgttaggttttgcccttggctagccttgcgagtttccttgtaatgaatctccccatctgcttgcaccatgactccggacataccctgccctagagcgtcatatacgacaattctgtgcctgttcttgtgatcctgatacaagactaccttgcatccgtttggagccgctaggctccgcacggttcgttctaggcccatcatcttacactgattgaatggtgcgtaaacagattcgtccattgtgttaacccttagcaatgagatcaacagttttctttgctgtgccgtgggcacggaatccgataatatactcccggtcggccacttggcacaagccgcacgacttacaattcaccttgtcgcttttctcagccggacaagctaccactttacgtcctttcggcgtaaagcttacattctccgcgtccatcgggagaatagtcactacaggggcgatgttcaggtcggccagttcatcggcgtgcgctacattgttgcccgacaggttgatagtaaacccgctacgattggccgacaatacgtgctggcggttcatgaaattgttcatcgggtaatgtgtgtaggtgaagccgcgacgacctttgttagccttcaccagttccatcagggcgatcccatcaataacgtcatcctgacccacgagatcgccagcttgattatgacgccacaaatccccacgtgagatagaccgtacttgcttaaggaactctttccactctacgccacgttcacccttgcttagctttttccagtgaatagcagtaggcccataagcggcatagcagcctttagccttgagagggcaggcatccgggcaggtgccgttatgagacgtgctaacaggcatgggaccggttttgctgtttttggaaacgagattgagagtgaagttcatgacggttatcctttatctagctaggcggcctgtccgcctttcttgctgaccattctacaggtattcgaagaggtgtcaactgtttttcaaaacaaaccacacaaaaatcgagaaagacaggatggtccagaacatccaaggtttgacactgcttaacaggatggctctacggtgaacctcttccggtacgctgtacccttggacattggtaggctcatcctctggcagaccgtaggcccgggcacgttgcttcattatcttccggcgtcgggcttttagtaccttagccatttcgttgtattcgtccgggtccgttgcatccctgacccgtcgcaattgtccctctagcttatcgacttcgccgagcttgctaaggtacgggtctatcctatccctcagcggcgtttcatcctcggtctggtcttgaacccacgacgggagccgctgccgtctagccataacataccgcccactgtcccgaagtcttaaagagttttatgtccttttgagcgggcagaccggcgaactccggcatggcgaacaaccatgcaaggcaaaaagcatggcgagcatcgggacagggtacgcattgacgaaccatttttggtatctccgctggggttgagaatcctaaaaccactcgacgaatgggcttaggattgccggcatttaagcctgccggcagggcacaaaccttacatatcgctactgaagtcgaaagctcggcctcggctagctttgcgattgtcacgcgatttgcgggactctttacgttcggaacgtttggcggcctcgaactggtaagcggaatcgaagtcggaagccttgatagaacgtgccattttaatctcctttctgtttaagtttgtcttgcttgagggccattctacaggaatggcctaggctgtcaagcttttaatcgaatttatactcgattccgttcaccttcgcacggataagggtttcgagattgatcgtacggaaagcggatttaccctcttccatgttcagcacctcggcagcggtatacaggtgcggcttgccagcgctggtcggtttgcgagtggcatactgtccgttagcatacgcagatttaatctggcgcttgcacgtcatctttcgaacggtgccgtctgccttgatgaactcgacgctgaagaaactgccatccttcgcttcgtcgaggatggaacgcttgcgatctacactgacagacttagccattatttcgcctcctttttgttcagcttgacagcccagcgcttttcagcttgagccccgttgtctaccactttgcgaccgttggttgccatggcgcgggcttgggtacgggttttgaaaaacatttgcatctgctttctcctcgcctatcggcgtcttcgttgtctgtgggtgctattttgcagctagtgaatcaggttgtcaagcatttatttcatctaccagtacgtagtattcgatcccacgccagcctcctcctactcgtgccatatcgccccggattcgctctactcggccagtccatatttctcccgtgccggcatgcttgaggaacttaccacctaccaattgttcgggcgtgtattggcacgttccgtcgagctttttccgaatgtcgccccggatagccacgatatctcctactctgacggtcatcagttctcccctcatgccgtttttacttcgatagaccgagcgacaatcggtccgtcctgcccgatattgtacgataccaccgggagcgattcccatcgacggagcatccactctgttttatcgcagtcgtctgcgaaaggcggcaggccgtcgcggaaagcgatctcatccgcaataagattaagtatatcgtccaacccctcgtctaggtcgagcgttcggccaagcaaggcgaaggcttgaatcaaggccttgtaactcagttcagagagaacgattttaacagaaaggctatccatcactaggcctcctccacagtgatatcagacggatacccgtcatggttgaccagcgatttccgcacctcttcggcatcacacatgatatcgaagaaaacaatgtcgatcaactggccattctggtatacgttccaagcttgcatttctgaatctccttatgctgtgcggaaaggttcgaccgatttcacgtcaaagataaccccgacgccttggacggtcccattgcagtaaaggctgtgccaacgggctgtacccttcgaatgcttcaccagataggtgcggcgacgatacatgtatgcgccgtcttcccattcatcatctttctcgatagggaagtagcggttcaaatctaccgcaatacgatcaagctcgctacgattgtaagccgcgtagagtgcccgatgattacaaagagctttcatatctgctttcctgcgtgggtgctcagggtgattccctttgcttgagggccattctacgcgaatggcccaagctgtcaacccttattttcgttcttcacccaaattaacctgcccaacgtttcaggccgtcctcgtacctgttttctcgccatgctagtccgtctgaaaccataatggttgagtagttcaagctggccgccaccgtgatggatggccagtcgccacggatagacgactactttttcctttgtgctggcgtactgctcaggtttagcgccaatcaatccgcaccactctttccatacggaatcatgaccatgatccggtcccgccttagcgtgagctatttcatggcggatagtatctaataccgcaggcactccattggcagatacgtagctgtaacctagctctatgagctttttagcgtgattacaacggcctagcgtccgtttcatcctgcgattgaaactgaatttccaaccttgttcgaggaggctccacttgtccatctcttgtagggccatcgcccgggcttcactatgtagcatggctgcttacctgccgttccgttgaatgtggggtcattgtgcatatataaaggaggcctgtcaacctgttttatgtagatttttctctataatttttcttgcttgtcttgatagcttgtgtataatgacaggcaggcgggcaacgcaggcaggaggccgagcaccggagataaacaccgagggagcctgagatttaggttggcacgctaattgcaattgcaaagattgtgccataaaaattatgttgacaaaggggtttgtcatagtagaataggcgcatcttaaacgcggggtgcgagtccccaactacatatcgccttcacgacggatagtcgaggcctacgcctgcccgggaaactggtgcgggcttgcaacgttcgtgccaactgaggtccgtcctaggaatttttagttagtgtgctaacgattaaaggtagcttgctaaccaattagatagcctgctaacgatccgcccttctgagaaatccggctaaatttcaggggaaattcctctgtagaaaaatccccttctgtgaaaaactgtccagttcctaaaaatctgcccagttcctaattttgcagcctgtgaaaatctatccagtccctaaaaatctgtccggtccctagcttagatcgcctcgtattcctcccgtttaattctgtgcagtactcttcgctgataccagctaattaagtatgctatacaagccctcttctcaatctctgtggcatccatctgagaaacaaactctttcatatccgctagccaatacgcatacgcgctaccgttgtcaatcttcattctaaccctcctattaagcgttacactgtccttctacggctaagtagtagctcaccatacctacactcgaacggctcttatacgagcattctgagccttttcctgagaaatttcatattgcccatattggccgaaactcccagaaatctaaaaataatttgaaaataacccctgccatgaaaaagcccggctctcgccgggcaattctaaaataatggtggcttattttcgccactctgctccgaccacggtccattcgcgggtccaccgcacctccgaggagctgtgcagattatcccatagaggatcatctacactaatacacttaactaccctctccggcacagagtaataggaagacggacggtcgtctttctcgttgtactcccattttacaccattcactaggtcgagattctgaagttcatccgggacgcttccagattgaatgtcggttgcctttggagacaggataaaatggatactccaccgctttcctaccggcttagcgaacacactaacccacttcgaatctttctcagtgaattcttttctatctagttccctctctagatggtggtaaccccaccgacccccgccccaccctcggctagagtaccggccctttttagctaggaggtgccaagtgatcttcacctgtccgaggtagacagcctctagtttctcctctgtcccatagctaagaagagtgcatcgatcccctgcaaccatatctttaacagttttggccgcctcttttcgctctacgaaacttacagcttctttgtagagagaggagccttccggcagtagaacgtgctgagagcccatccgaacccacacgcaaggctcttgaataactcccttgattactgtgcagttgtagagcaaggtcgagatattcccggtaggaacctctagaacaaagcccctagggtccgtcacacggaaatatttgttctcagtgacccagcgttcaacactgtccccgatgaaatgccccgagatagggatgttgtctatgaagcaagtctcggcattcttacctgcccagctcataccagtctgctgctttttcttgaagctggcagccaagctaccatctttattgaagtccacttgagacatgtatgccaaaagcgtccctttatagtcgcccttccgctcgcttttagctacccatagttgcttcgatatattgaattgcatttttcttccctcctctgttggatgccgtaagtttacatattccggccaaccttgtcaaccgcaaatttcaggcaaaaagaagcccgccttgtgggcgggctgaagtgtggcgtccttgccactaaccatgatttgaatctctacctacaacacacctaattacctaattaccaaaggtcgtctgggtaggcttggccggactctcgaatagccaagtggcgttctagaaattcgatatgagcatcaaaccatgcacggatgcgttgatttggtgcaaagcgtctagcttctttgaactcttcgagttcctgccgcagacgacgtaccgagtacttgcgatacacggcctctttccagcggctagtcattgctagtttccttatactgagtagggaatttcctacatcccattgtaccattcgtcggcttattagtcaatctcaagctaggggcccgggccaaaccgagtcggggtttttaatccacgccttaatatcgatcagagttttgaagccttcggacttgatcctgccttcgcatccataagggtaataataccactttttaccctctttaccgagccatcctaacctctttttaccgaaccggacgatcactcgcccgtccggagtgacagggaggaagttgacgcacttgttagtcgcggacatttcaccactccatgctaacagtgacggtcttagtcttgtcgtacatgttgcggagaatcgcttcccagcctactgccgtgggatatacagcatttacctcgtaggttttaccgtcagaccgcagtcgaacaacatcacctgccttgggtcgcttatcgagggatagagtttctacttctttaggctgtgctttcatgagtcctcctcacatcttgctgaagttttgtttgtagtcattgtacacgctgtcgaacagattcgcaatagcctgaatatgtacttcagacggggtgccagccgggagatacttacctttcggggtaatcagagaggttgcttcctgcccgttctcaccagtatacgtcacagccgcgtttactgcaatcttaatatcgcgggccgtagcctcgcccgggcgcataacctgtttcacttcgctaagaacacggtccttggtggtgaattcacaagcaggtttgcggtcttctaccttgatgcacatgctatacagcagcttctcgctcttcacggagcgaccgagattgatggtgccgtcttcagtagacacgacaatatcctcggcgggcgcgctcttgttggccaacgcagtaatcccgactacaaaacctattgctgcgagagtcagagcgacaacgacaatcaaagcctgcacaatctctttcatattcatcagaacacctcctagttaattttggaatccagtacgttcaacacagcctcagcagcttcacgaagctttacacggagcttgtcgcagtcctcgatactcacctgctcattcatttcagccatagtgataagcccgtgaatataccctgtgcgattagataacgccctgtcacggaagttctccgagtacccagttacgtcctcttgcaagcgttcgatacaggccgagacatactcgatgatcttctctgttgtagccatggctcctcctctgtctgatgtggccatcttactagcacttctattcgttgtcaaccctcttgctgtctgcgatatcctgtagaagctgcatcctgacgaacggtttatctttctctgccttctcgcagtcagggcagtagatagtgcatactcctcggacgtacagtttacctccgcaggcgtagcacatgttaatgcctagcgagtctacaacattaggcttcatatgcttcactccggctcagtacacaagctagtaggcaggggctcttatcgaagctgccttggaaatgcccatagtttgcagattccccgcaacaagggcaaacgtagcccggtagagtatagatagcttcgtcttgatacacccattggatatcttccagtagggttttcacgacacgcatatcacacttagcgatagccaccttagccttgagttcggctacctctttttctaactcaccgactcgccttgagaaagcgtcccggtcatacataacttgcatgtatttatcgaacatatccattagtctacctcttctaggatgatgtagcccggatacaggaatacttcagcgataatcccttgacgaactccgagttcaacgcctgtgacaccatttacatggatttgaccatgcttgtcctttgtccactgaacgcctttaagcaggttataggcggccttctcgcacaaggtcagaacgtgccgaccttcgttatcaagcacaatataccgagatttatcaatagtttgttccattatactacctcctcaaaagttggaactaagattcgttgctgtccattgaataccggtttatcaggctctacgtcattgtactcccagatgctgatgacgcgattatccgcagttacgcaagtgaattcgcagtacttagcccctccccacgcaatcgctacgtccatagcttgcgtcgctgaatcgaacggttcactggtctgcattagtcgctttttaaaatattctttcattaaaacacctccagtcctgtttcgcggatagcttctttgcagcgattgattgtgtacttttggatgtcgataaatccgccttctggcgcgggaagctcaacactcacttttcttcgactagccatccagatatattccgcccatcctttggcacaggatttacgaagttcttcttgctcgtcctgtccccaccatttatcgaactctttgcggagtttgctgttcatcgcgtgaactccacaacccatacagggttgatcccgccagtgaagtctcgacggattgtagcagtccatcccatatctatcaagatatttgtacgagagcacgctgcgctccaagtgtagtacacttcagagaatttgttcattttagtccctccttgttttgatgtgctcagaatacacaaaggcccggaagctgtcaagccccgggccaatgattttacatgcacatttcacattcttctgttctggagatatctcccgctcctctcatactgtagatgtagtacaaagataggatgttcgggtcttccatggcgagacgatggatgtacgaaatgtaagccggcgagtcgttcgacgtgaagtacaggttgatgctctgaccttggtcgatgtacttctgccgctgagagcacagacgcaggtagtcttccattctcacctcaaaggcagtacggaacacagccttttcgtggtcagtcaaccagtctacgtgctgaacactccctttacgttcgttaatctgccttgcacactcttcccaatcgaggcctcgctcttggataatctccagcaacaccttgttgacacggaagaattcacctccagcgctctgcttggtgaagcacatagcaacgtccagtcctatgccctcagaagccccagccatgagttctgccgtcgatttagttggcggcatcatcattgtagtggcattacgcttccctagtccacggcagccctctggctcccctagaacctcagctagccaactgttacaagcttccgcttgctccttcatacccttgaagatggcgttgttcaggaacatagcatccatactaccgaccgggaatcgctcccgctgtagcagggtgtggaaccctagaacaccgctgccaagcgccctgaagtccttggtgaatcggtaaatcttctccagtgctcggcggtcctgaacgctgacctcatccatggttgctaggtattcgctgatgttgcaatcagacataacctgaccaataaacacaaggtgcttaggccaagaacggtaaagttcgaggttgtagttcaggataacgcagctaaaagtataccagtcatttgccgggagaacagtctcttgacaaaggttggacgcttcacagcgtagacccgcccgtttaaacggctctgcaaggtgccgattcatcttatcgataaacgtgaagtagccttttcctctggccagcttgacgaacatcattcgcttccatcgcttcaaggtctccgggtctttctcggccatatccttgcaccactggtcgtctagaagccatccgacgttgttcgactctgtgcgcttatacaggtgatcgataacgttccagaagtctccatggcgggggttgatgctgtatgcacagctaccacgcctagaaccctgtgctacctcttccatgacgttgataacgtcccgaatgacaggcatcacaccttgagactcaccgcctcggatagcgtctccttctgatggccagttggtcaggctaaagcttgtgccatggctgtgcttcgttagcactgcgatctctgtcattacattgtaacggtcatagaggttgttgtccatcagaccgccagcacaagataccgtagtgcccttcttgcggagcccaccgttcgacagaagcggagtggatgggcttacaaaaccgtcccacataacgtcgaagaatacctgttcccagtccttgcctctagtgtattcgtcctcctcccaccactcaggatacaccgtaggggcgtgctgagccatagcgcgagctacagcttggaagcgagagcgtacagactcgccctcgttcgaatacttcttcatgaacaactggtagccagccgtcgtataccatagaggagtctcgccggttgcttggctgttcttcctagcttcggaatagttgaacgtgtctctcttactcatatttcagctcctcttcccaagcctttgccaattcctcttcatcccaccctagttcgtattccatgcccatacccggagtgaagaagtcgatcatcttgtaggcataagtgttcatttcgaaccaatccttgatcggagtgtcatcgttttcgaagtgatcttctaggccgagtctccggcaccagacattcaaacgataacgaacaaacgctttatagttttcagccgactccccattaagttctccgcccgggatcgccatatcgacaatacgacattcatgagcatatacatggtcgatagcttgtcgaatcttctcgacacgccgagtatcttcagacaatggtctcccaatctctgcgtagtattggttgatgatctcagccgaaactacaccgtgcaagtcttcatccacagcactctggttagccccgcgtgcgatgacagggatatcgttatacccgttgcactggaagctcttcaggatagcgaaagaactgaacagaagggcagtctctgttaggctgaagataattaccgaaagaacatcgtcttcatcgcctaggacagactcaagccaatccattcgacccataagctcggggtcatccttgtaagctacatagtcctcatctgtatccatccccagcactacgttgatctggttgtagaattcagcgtggactgccaattccatcatgcacaggatcgaagccgctagtttaacctctgggcgagggaacgttcggactactttacccatccaaaactcctcccctacgatcagttcgtatttgaggaacagttgaaggacagtctttacagcgtgaagctgatgaggttccaacttaaacttcaggttcaacttatccagctctaccttcatttcgctagagaaccacaacttctcttctagttgctggtttgctagttcgacaatgaccggatatttccgggcataggactccgttggagtcctgatttgtgtgatcttattgaaaatatcggcctcatctacgagagcctttgtaacttccatatctactcctactacattaattgtggaacgttgcctctgtcgatccctctggtcgcatcttacgaagagtgaaccgtagattactatcatcacacgctgcaatatgagcttccagagaggcgcaaccgaggctcagccactccttgtctgtacgctcaaagccagagaatcgtagaccctctacgactcggccaatcagggtgcgatgctgacagaaaaccatttcatacgagtagtttttaacatccatgccgttagtccacagatgctcccgcactactttttcattattactctggaacgcctctttgaagccatcgaccagcatgaggtcttccagactcaggttatattctgccatttttaaactccttcctcttcttggccgtagtactcattacatacgtgccctttaattagttgacgatgttggatgaaacctcggaagttaccagaccagaggtcaccatattggtccaagtgcgtcacaccgtcctcccatccagtttgattgtccgagatacggagcatcggcgttgcttggtgttcaaacgggctagcgtggacgggcttagtatctaccaatcggttgtagattacaagagctttctccagagtctcatcgttcttcctgtagctaacctgagcacaacagctcgcagacactttgatagcatcctctacgctaagctcctgtccgttgcaatctgcgtaacgcagcttaccatcccctatgcggaaccgagtcacataaggaacatgccactctccgtcatatagagcctctgccgggcccgctttaataaaagcctcatacattttctcagcgagaaccttgatctccggttgtgcgtctttatggcaacgcaggtagaagaagttatctagttccgtggctgtaacaacggtcttcatcatctggaacggctcaaggagacggttaaccacctgcttgtggagtcccattttatttagtgcgctagcgatccgagccgcactctttgcagccttcttccacaggtactgagagctacgctgcaaacactccctcagttcgaactcagcttgcatacccggttgattcattccccagtgaacaggcatcgcaggattctcttccacctgtcggatcatatgggcaacgggaatggcacgactacttgcagcatttcgactaaaaagtcggtgagtcataagttcactgtgaataaaccgaggatactccagttcgaatgtagtgatgaatctgtgattcttcgtacctaggccgatccgggaactgtgttgaatcacttttgcagaaatttgcataaactctccttattaaatctttgatacaataaagggagccgaagctcccttgttttactgaagcattgcgaaggtgaggcaccagacgatctcgctagcgaggataggatgcaccatcatgagcttctgttttactttctgtatcatatctacacacctccttcgtttcaacttggagcctattatcgcaagcctcggggagaatgtcaacccctttctctgagaatcttatcgatctccaactgagcgaagaagatgactttctcgtagtcccggataacatcgttaccggccttcagcttgcctaggttctgtgctgccgcagcccgccacaacgctttgaacatgttgccttgaccgaatcgcatatccagcgcttcgatgatatcgttgcactctgcaaaatacggcatgttagccttcgtagtggggttgttcaccttgacagtgtagtaactagaggagcctccgctacctacagcctccttgtggttagccatagcttccaatgtggcatagttttctttgcctaggtaatcttctaggttggcgaacacaaccttcttacccagtgcaacaagctcttcattgagtctgtcgacctcggctaaagcctcgtccctctcacttagttcgtcaacttctttgtgctctactgtctcgggattcccagacatagctgaaagttcctcatcgtcggcagtgtaaggcgacagaacatttttaagaacagccatgttgaatagtggcatccctttagggtcgccgccaatcagaaagtctccgtagtagcgctcactgtttgtcaaaggctgagcccgatcccagttaacaaaggtagtcgccggagggtcttcgaacagaacatcatacgcttgttcaacgtcgccgagactggctgggttataacctctctcccttaggaggaagaaatcagagaatctacataccttaacagagtgctcgtcatctgcaccactcgccagccttacgaccaactctcccttttggatatcgccccttttctcggtaacaaccaagactgtgccgtgagggatggtatcggcgtcccaatattgaatattgataggattctttgaccgttgcaccagagaaatcggttgcccagcatgaacgtcgatgatatcgttactcaaagttcacctccatatctttcaactcttgaaacccgtcaagactctcgatcttagcgcacatcactctcatagtgacatatcccttcagtacacccttcggacctttaaactgactctctaggaaggccagcagggcatctagccctgctgagtcaaccatgagatcgtcgccagataggtcttcttttacaatctcttcggccacttgttactcctcgtcgctaatcgattcacgaatgcagtccagaatgaaggacaggttcatgtgcagagtcaggagatcgtctttggtctccggcatcgcagcaaccaagatcatcagcttcaggaagtcagggccacccattaccagaggcagatcacccaagctggtgcggatgtgtcgtgcaagcatgccatagtccagttcaccgtcctcggtcacgatggaatcttccagagatttacggtcggtcaaggctttctctaccagagcccgctgctccgggttcatacctgccattgcttcttccatttgctcaggggtgatgttgaaatcagtcattttatatctccttttcgattatttagatttacggtctttgaggtcgattttgaaaatagcgccactgttgcattgtacagtagcactctcgaagtggtcaactccgaaatgcttaactccctcattctgctcgcatgtcgagagcaccttctcaatagattccgaggttaccatcacgcccatgtacagaaagagcaaacctgtaagggccgccccaaggaaaaactcagccatatgccctcctattaaccaatcactttaacagagtcgaagctcagcaggcctgcgtcctccagttcctcaatagtatcatcaatcccgcagtctgacaaggctttaactacatcttcttccatctggtagtagtctcgccacaggcactcattgatgccgatgtcccattcacaccagaacttataaactgtcatttgaaacctcctttctccatcataaagtctagactcactggcatcggcaggccgaaaccatctttcacttcgtgaatcatcacgcagccacggaagtgattgttgccctgatagcctttgtaagcctcgtcgtgaggataacacgctccagtcacaatgccaagcctttgtttaccatcgattgtcggatggattgcccagtccagaagctgacgatgccccatgacaaacgaatgtcccgcagccttgagcatgttgttcgctgtaccacctagaggcttgccagtgaagtggttttgaaggtagtggacgtagtagatgccatccacttcgataggcttgaggaacgggacaacctcaaaaccgtagtcttcaatcccaagctcctcactgccgacagtgccatacaattcaggattgtcatttgcagcccggtcggcccgctcttcgtggttacccagtgtgaagattagacgaggctggtacaccttcttccgattagcccgttgacgctcctgtagctcccatagaggcttaaacagtcgatccagaccctctcgtccgacttgaacgtcttcggcgtacctgcgcccctcagaggagcgtttacccttatcgtaagacgacaggctggctaggtcgaagtggtcaccaatgtggataacaacatcagggcgtttggctacgatgtatttaccgatagcttccatgtaatccagattgatacccggtttgcactgtgtgtcagaaattacaaaatgtttcttactgctcattctgcctcctcgcagtcttgtccgtacagaaatgctccaatgtcctcatacacagccgtatcatagcagtggacgttatcaaggagattataagctctttctaggagttttgtggcttcctctaggtcttgtttgaggaagtatgctctcgggtctgtcatgctcatttcgtctccttcagtagtttaatgatcgcgttatacgtgaattctctgactgtcaacagaacatatccgtgtcctgtgtgatccggtacttcaaatccgataacatctcttagcaagtcgagtaccaattgattctcatttttcagagattcagctatatcgataatctcgaaagccgattgattcttgaaagctgcggcctctcggctagccaaacgagagagaccattctctactatcatagggatgcttaggtcaggccagcgctccatatcctttctagcaacgtacgctccgtgtgcagtaccctcgtaggcgtttctccaagctagagccgcagccccttttgttgtccattgccgcttccctttaggagtagtccaaagctccttagttttcttgtggcggataacgtatgtagcaagactggtcatagctcctcccctgtacgaagacactctatcgctcccttagtagcggaaatgagtaccgagtatccctcttccaactgatcctttgcggtacagaagaagtctataactccggcgatgagcgctgttacaactggcagccagaagaacagagcaatccaaaccagaacaagggaagcccttaccctgatgggcagcttgcgcatgattttaagaaacttctctctcatataccctccttctttgatttaagatgagcgatgatctgttcttttctaagctttgcgttagatgcaggcttaattccagcttcctgcaagaagaccttatcataccccttctgcttctgtattgcaatagcctgtttcacgatatcagcctcttctagggtcagcccgtagcgctcggcgtatgtcttgatctcatggcacggtttgcacaagacagccaaatctcctatgcggacaaacaccacaccttccacgaacgcttggatatcctctactcgcttcagggagaactcccccgtcttgtggtcaatctcaacgttagcttgaggagtctccttcccgcactgctcgcacacatagccccacacagtagggtgcctaagcttgctcttttcactgggattggttatcctaatccttcgggatttagcaaactcaagcttgactgggttcttagaccagagatagcggcgaatgccgcctctgacccaattcaagaacgccgattctgtctcccagatgcccgggaagtcctcccaaggacgcgcccttacgctcattctgcacctcccaaatccactccaagtttagccaaaacagccctacagtctacccggtcccccgcccaacgttgcatgtgggcgcagtcacaatacatttgcatgatatcgattgcatctttagtgtgctctgtgtcgtcccatgctgtgtaagtgacaggctcaggataccacgatttgtaggtgtcgtagattgcttgccagcactccttgtccgttgtgcagggactgatgacgttgtatgccgccacttctccaaagtctttccctacgcacaggtcggcaggtctgtagcagtcaacagggtcgccgaacagcaactggaagtagaagaacttacgtccctcgcctctcaccttgcccttagagtccctgtagagcgatcctaggcctgaaatgaacttgacttgaacaggctcacgttcgtagttacaaagccatcctagagtgccgtctgcgtctttatcgatggtagccccgatcacgcgctgagtagtctcccctctggagtagcttacaccgttcttgtacatcatttcggccatcaagtcgtccgcttctccgggatggatgatggtgtcatacgcttcgatcatatactgccttagctgacctagctgaagaggcttaatctgccctgtacgcttacccttgtacctgccgccacgagtgaaggtctttttacccttggtaatctcgtactctttcgggaggggaatggaatcgcggaagttgtcaggaccggacaggagaatcttgaactgcttgcacccagcttggcggcagattcggtcgatcatggtcttaacaacagagataccgtaggacacgtgcttggggtcttgatggtcctcaatttcgaagttgtcttcgttgaatccctcttcgtctttgttattctcccgccaagtcgtccgattcttccaagtttcctcttctcctgtcaatttgtttctgacaatgatggagcgggtctcgttgacacttgcacacttaaaggcgataaggtcgccgtcgatgaggacgatatcctcttccttttcactcatttttatctccaatgaaaaagggagccgaagctccccttgggttagaactgtacaacctgaatgtcccactctgtttgtagagtgtcagggtttaccttgttaggaagagcaacataagccggctctcctttaatgatacactccgcagcgttcttcaaatctttgaagagatttcgttcccacacatcgccgctaaattggttgtgtactgtggggcctttcagaatgtactcaggtactcgaacaataaccaaactactcatcattagtcctcacttatttcgaaagtgctttttaaagctaaagtttagtttactgcgatcaccgaatgcgtaaatcaggcctacaattacaagaaacagcacgagaatcgacagtacaattacaagaggaatccagatgggcatgagtgccacagtccaagagatagcgagaactccggcagatttcagtacgcacagaacgatagcagccagaaggaagatgggaccaaaattgatttgcatgtgttgcctcctttgaaattttgaaaggaaggggccgaagccccttgtcttaccaccgtcctttagaacggaatgtcatcatctacgttggtttgaaccggctccactttaggtacagcttgggtctgcggcttatcttcagcttgctcttcgctgtcgccactggagcgattaccaccgcgtgcagcttcaacagcttcgatcattgccttgatgtccgaaccttcgtagttcttggctcgcttgatggtgttgatgacgttagcacgcagttgcttaactgcctcttcgtcgttctcaccatacaggttcacgccgtagatgtacttctcatccagttcaggaaccggaacaccttcaggcaccataccgaccagactaatatcctcggtgaggaatttcatgtcgtttttgcccggcttcatccacactcgaacttggaactgagccactttacccagaagctcgcctacgcggtccttggtgaagagttcgtcttcgttgatgacgccagtagctacagccagtttgtgcagcatggagttcttagcgaacgcccatttgccgttcgggtgcttcacttccttgatggtaaacggacggccaacaatcttagtcttctgacccggcagagtaaagtcgccgttgtacaggacacgaagcggagacttgttgctgttaccggtcaggtacaggctcttgtctacctcgatctgagggaagtccacagtgatcgcgatttgttgcatatcgcgctgcggccagcacttcagacgtacaggcttgcgagtctgcttgtccagtccatccttgaagtaagtgttcggatattccttgatgatttggatttcatcttcggcagtgccagtgaacacaacctctgcatcgttctgctcttgctcgccgagatcgatgataccggagatataacccgggatcgaacgcgccttagcggcagtgccggcagcttcaacgacatggttgttcagagcatcccaatcgacttccttgcggatgccgccgttgccggattgagtgttggtggttacgttcagtttaaaagccatttcatttctcctatttaagtaccctagactgggcgagtgtgtcagccacttgactgacgatcataccggacattcccggattctgcaagaggattagcgcattagcgcaccttctctcctttaattagttttacaatcgagatacccttgaagtagccgccccagaaacgcttagcgtgtcgagcctcttccctagtggtggcaaattcaagcaacgatccgtctgaatttaggacagcataacccattacagcgggctttgcaaccttttctttcttctcttcgttgaccggggcttcaaccttaacctctgcctcgtcctcttctttgaactcctccagcacaaactcgggatagagggtctggaactgcaactcgtcagaggtttcaccgccaatgtcaacgcgtcctttaaaagtcatgcagaacgggctctccccttcgtgcatgctcttcaaccagcacgactcgaagccttcgtacaaggctggttccgaagtaaccaagtagtgggaaatcaagtcagggcgtgcggcagcagccttaacataatacttcttgcccgggaccgctacaatttcgaagcggtcgttgtcagcgagcatcgactggtaatctccaagtccattattgacgtctcggtcaatagaccaatggagggagcagaaccggatttccccttccgggagaccgatatcgcgtccatctactgcgactgcgtatgcgcctacatatcgggcttcctttggccagccaacggtgacgtcacatcccacttgagtgagtttgacgatagtcccgggaataacaccagacatattatttacctcctttctgtttgtatttgttagccacgcttttgtgggctaacggtgtctccgatacctcgaagcctttagaggtatagtactcccgattggccttgttgtcaacagtgattcctaccatggacgatttgccgtagacgtagagtcgagccgtgttcataccatacctcctattctgtgattaccgtatcactcgctgctgccttcaacagccttcagagtttctttcttagcccgcttaaccagagcttcgagcagttcagtagattcgctgagaacctgctgagtagcgtctgcttgatagaggctctgtgcagcgtacccgccaaccatccaccatgcggtctcagacgaagggaccagatggccgactacaatgatagggaggaacagcttaaatgtcaagggctgtaggtgatttttgagtgtggctttaactgccgcattctctcggccaccaatggatgccaagtaaacgaaccctcctgcaacccatgcgatgatggtgacgaacagggcaaagctaccagccgacgacaaggctgggaatacggtcattaccagatagataatgaaagccagagtcattgtgtttctccttgtatgttgtgaatatgtggccattgtataggaggcggaggggcctgtcaagcccctttcctcgcttaatgctagttttagtggcaatccttccaagatcgaccaacgatgtagccagcggtcagctcgataggcaccagaggagtagagtagaactctcccgcagctctcacggccttcgtggcaagttctccagcgcggcagtaagctacaaacaccccgccttcacctttgctgtagtgtgcgatatcactccacaccttgccagtgctagccaattgttcgtccttgtaagcctgagctagagctttcagcttcttctccgcctcctcctgttccttttctccttctggcttaccgcctacaagagaccaagggaacatcttgaagctcaccgacttggcggttacttccaactgcgcttcgtcgtggtacgcgatcatttgttggcagaattccggcttgttcttccagtcttctttgaaaaagtcaaccttcagaccttctttctccagcagttggtcatgaatcaccatagcacgtttagcacagataacaccgccactctggaacaagctgttcaggatagcgtgagccgaacgggtaggaacccggcgaccgtccactccaacaatatacttcttaccgttggcttcccactgtttggtcagatcgtccttcagagctttcaatgggaatgcagcatcccagaaagcatcaaacaccagttgaccagtttgcaagtcggcaccaatggttttcgccactttaccagcttgagcgccgtatgtaccgttgtgttcagggagggtcgttaatcctcccccgtaaccttgctcaagggttaccgctgcatgttcccatgcagaccagactatatcatgacgctctcgcgccctgtgcgcttcgggtcacttgaccctactctactcccttccggctcccgccgtggtttcgatagtcgttgcacctttctagatcactctagcttggctcaggattgactgttctagtcttcccctgaattcacacagttttacatgggcttgatctcttacccatattttacgtttttcgcaggagatcggttaaattggcgaccaatgatctcagaaatacgcttagccatcattgtgtgaacgtcaaatggcttctccatcataagagatttgcaatattcctttgtcggatcgtactgatcgcagtaggccgactctttacgtgcttccaaggaatcgaagtcgtatccaatttggaagaacccatctccaaccccaaacaactctcgaagctcagccccgtacaacgaggtgatccgaggaacgttagcaaccttccggtgcttcatccggctagtagcagccccacaagtgtcagcaggcgtgggaatcctgccgtcctgacgaatgcttgcaaggtaacctttttccggctcctctccatcctccatttcgtcccagtccatgccgccaccgaggattgcgcttcgccggtgcttaaaggtcaggtactcaatcacatccttcgcgaacggaaactgttctgcaatgcgttcgaggtctggacacatttctttctcttggccctttgtgaagctagggttagtgagaaccttacagctccccttgcttgcacgatcaatcaacctctgacgtacatacgcgcgggtgctacgaggggtgatcttcatgtaatccccgaacccgtccagccgctcttccttgtacgctgtgctatacgttacatccagccagcgatcgatcttagcaacgatgttttccatcggaagcttgatcttcttctgatccacagtcagatcagtctctttccactctgatggaatccaaccaaactcacccataagccattgcttgatgtgagttgtgtccccgatcttagcaggcatttccgtcttcagcggtacgtcagcgggaagcggaagcttgtactccttgccttcgaagatcatcgtccggtcgtcaccctctttcaactgagccccaatccgctcaataaacttctgcaagtagctggtgatctccccgttctgcttgaactgccgcttaggcggtgtgtaatcagccatgaacttcttagtcgcaggacgaggaggaagcacaggctctacccgggcccgacgctcttccatcttggcgtccaagtctttcacagctttttcacagagatcaacattcagtacgaagccacggtgctcctgataggtgattatctctgcaaccttcttctccaactgaatcggcgacaaccagttcttgatgtagttgtctcggtcggacagttggtaatcttcgtggtcctgcaaccagtgccatacagcggtgttcgcctttacgtcatagatacagtagtaaagcatatcggcagcgaagtcgaggaatcgaacatccggtgccagatgcttgcggaagtcaatcttggtgtcaccacctgcacgacgagacagcttatccagactgtgaccgccgaacaggtcagggttacaagtcttggagataacgagggtatcgtcgaataccacttgcttgcccatccaagtgtcagcagaccacgtagtcagaccgccatccctgtgctctacgccgatagtgaagtccatatcttccacaagcttcatcgacataaggtcgaagttaatcatgttgtgagccactacgcgcttgatcttgcgcttgagcacatagttcttgaactctttcagcggcaggtgaatatactctaccggagtgtagtccttgagagtcacaacttcttcagtgtggagcatggaagacgctttcggcagtctctcagtgtactctcgcccgtcaaagacgtaggtcggcccatcgtagaatgccagaatattgccaccgtgctcctccactacaatgcagtggtgtttgtagctaggcttaatcttgtaggggctggcagtgtaatcgatagacgtttcatccaacaggcctgtggcctcgatatcccaagtcatgttggtgaaattgttatttcccatccattcgaggtattgctcgattgtttcaaatcgttgttgcatttcctttcctcctgtaaacgacgaaagggatgatacataagcatcacccctctgtcaaccttagtattccgtgtcccggccttcctcttccttctgagccatccaagcctcgtattcacggcgcttgtcagggtatcggtccagatagtcgtccaagtcccagattgtatgagtctcaacgtcgtagtaccaattgcccatcattccagtgcggccagtccatcggcacttagagagcttcacgttaatcaggttcttttcgaactcgttctccgcgtccttgttccgccacatcagaatgttagctgcaccagatttgaagatggacgaagacccttggaaatcttcttcgtacagttccgcacctgccgagttagccttctgaccgccaccactcttacgaacgtggttgatgttgatgaacgtcacacggtggctcttggtcatacccttctgccagcgcatgaacaccgattgctcttcattgctcaaaccatccagaatgtcctgaagcgggtcgagaataatcacgcggcactcgaactgaataatcagttgctcgatttgagccttgagggctgctaggcttccgtctcggtcatcgatcagatagaagcgcgggcttccgtcttccttgtgccacaagtcgtaccgagcatcacggtgccgatcaaggaacgccactttctcttcaacggtctcgtacaagtctgccttctcacctaccttccgactcagcagcttgattgcgtattccccgcagtccgattccagagtcacagtacccggcatatgaggcgagttataaatccaaaacagagtgaactcatccactacagtagatttacccatgcccgatgcagcgccgatattcacaatccggcccaacgggatgcctcctgccatagccttctggagcttcttagcgaacggtggcagaggaatcttctcaacctgcacagcttcatacattcgagcgtcgagtgcatcagaccctacaataccgctaggggtccatgtacgggctcgatagaatgcactgacaaactccgattgacgcccagctttcaaatactcgttagggtctttacggttcatttccatcatgaacaccttgcccttcggaagcttatcggctgccttgtctgctgcctctcgtcctgcgtcatcgctgtcgaaacagagaatgatttgctcgaaccggtctagccactcatactgagcctgtagctgcttccatgccccactctcaccgatagtagggctgaccactggagtcggttcataatcactcttaccgcctgctcgccggtcatcgtactccttgagcatctggaatgctgatagctggtcaacctcaccgcctacaataagcaccttcttgctgttgctattcttgaacctgaactgaccaaaaagctcgcaatccttcccggtctcgccgataggctctgagaagttcttcggcatgatccgctgtttgtaaccggtgagttcgtaattagtagtagtaggatatagctgagttgcaatctcgccagtctccgggtcgaaaccatgtagcactccgaaatactggcaagtctctttagacaagccacgataaccacgcggatcatacgagcattgctctttaatttgagcgttgatctctgcgttaaattcagttcccacgaaattccactcctcttcgtcttctccccgggcgtctctttcctgctcttcagagagcaaggtgtacccacacgcccaacaataggcacctttgtgttccccggtattacgatcagtaccatagacctttaggttgtctccgctgttgtcagcgcctttcttccggcattggggacaagcggtcttgtggtcagaatacagatcgataccgtgcatagccgcaatttgggccacggtcattttggacataaaacctccttacttcagacaaccacggagtttagcatcaccttgtgttcgtgtcaacccctctccgagacgtattggtcccgcattgcacggtccataggaacagccacttgatagccggagcccagagtagtgactgtccattgatctacagcgttctctgtcaaccactcattcatttccgagaacgtgtggaagtagatgtatagcagattgtggtttcgtactgtggctctcatggcgagtcgccttctctcatgtggttgaatggtgagaaatccgcatgatcttcgaacggaccgctccagtaggtggcaaactcgacctcggtgagccttccgtcgttctggtagtaaccattctcgtaccctccacaccgatgacacatgcctccagtgacttgctgcatccatccaagcccaacgtccacgaactcagcttcagttctctctccgcaccatctgcactcgggtccgttcattataccctcctacgcctgcttggacaactcagagcgctcgaagaacaggtgaaggtactcgataagctctccgctctcgtcttcgtagttgcccacgtcgataacacaaccctcttcgtctaccgagacgatggtggcaactcgcccacggaagatggtatcagcgtcatcattgatcttcactttgtcacccttcttcatttaatcgctccttctgtttatgcttaggcttccgcctgtatttggttttatccctctctaccgagggtttgttgactgtgttcagaaacttaaacacagggttcttcttagccatagaatactcctgatccacatttactacaacccttataccaaatgcccgtcttatggcggtgcatggtgggctccccgaagtgcatacaccggtagcagagtcgtttcatttgtcctcctataaacgtgtgaagtctttcagcgggatatggaccataacttcttggtcttgccagtctccacggtcaatcctgccacccatgctcatgtagttgacgccattggctgtcattttgacatatcctgtatagtccgtccactttaccacaaggaatgcgggaatgtcaaacaccctttgcatttcgatcccatggagccacttcatctgggacacaaagaagtcgggatatttctgcatatcattgttccgagctttaagctctacaaagctgacaaccttgccgttccggcatgccgcccagtccatgtagtgggctctagggagcttatgaagcgagcacttccaccgattctctagctcagaacggacggcctcctcgaccgccctatctgatgcagactcgtaagtctgtctagccactcaaacctcctcgaagaagacgtactcaaaggagtgagtcataatctgcaacttcccttctacgagcttaccctctcttccttgatcttcatttccccaaaaggcgaatcggcaccgttcgaagtctagttcgaggaagctcggctccagctttcgaatcttgggatcgataacgtactcaggtttgatataaaatccgagacaagccgtgtccatcaaatcccagccattgtagtgggaaatgaagtagctctctagcccgttcgcttcaactgcaatctcttcgctcttactcttgctcatactcacacacctccttcagttttaatagagaaagaatctaggaaatctcggaagtagtggtcgagttctcccatcgcctcgataatccgcatacacgaagcttcgtcctcctcctcttccaagattactacactcatatacttactccactggtcatacaactccattgttcacctccagttgaatcttggtcaagtacataccttgcatttcatccaagaagtaaatgagttctccctgttccaccaccgtcctgattagcgcccctgctacctcatactgtagaatgaggtgtacgttacctttcctatcgtaaatcttctctactacatacactacgataggcggggtttcgtcttgatttacactcacaggcacgtccacttctacgacttggccagttcgtagctgctcgacggactcattcagtcgctgagcgttagccggagattccataaggtagtcgtggtcacaaccgaaggcctcgtctagggtgcttacgggagcttttgctgccttacatgcgatgtaaagatcagaagcgtcaacaactacaacagccctgtggtcagtgtaggcgtctagacgtactgcacagcactcttccttcagtcccagttcagtcatcacaacggtgcctttcaagcctccggccagttcgtcggtgtggacccaactgtcttctacaaaccccgtagctagcagttcatgcaaacgaccatgcgcctgcgcccatcgctttgcacatccagtgtatgtatcgcaataggccttaaggaccacccgatctcccacttcaaccttaataatctcgctcatgctttactccctctgttgatagctcgttgcttctttgcctcaaggtaggcgtcgtattgctccgctgtccacggaggaaggtcattatccacgctgaacgggttgtcgtcaacccatacagagacttttattccaagattttccatgaatggacgctttgccttctgtgccgtgaaatagatcgggaacccgtaatcccgtagccactctaactctccgctgttgtcagggtggcgtgcagtgactacgatcacattgaaagcgcctccaaagcccctgaaggtatccatgacgattcggaaggcaagagggtagagactgattgtctcatcataatcgaatgcaattacaaaaggttcgcccataaaacccgctaactgatccatgttattcacgcccctttgctacgtactctgtcgtaggaggtgctacatgggtgacagggactgcaacccaagcagtcacctcttcgtgacagacagggcattctgcggagtagtatcccgtctctccgggacggcagaatgagaacgaaacatactcaagttccgacctcttagcccggagaatgctcaagcaatggtggcacttagccgtaaacaaatcctcttgagggagcgtccctctcgaaataatttccataaatcctcctctttgtacttcagatgtttgtgtttagacataccagtccggggcctttctcacaggaggtgagattggatcaggcttcctctcgattttttcaggtgcctctccgggccacacttgccagcagtgccagatggtacgtctcttgtcattagtgtgatcgtacaacactccgtcgatgattgcaatagcgtgaccctttaccgcgatccagaaccgaccttcagggttttcctcagcaaactgcctaagagtcttacccttagcatcctcccggtagagcatccgggtcttagggcaccaagtgtctgcgtagctgaagcgcttctgagtagccccttgccggtaaccgcgcttgcacttcactttcaggtgctggtgtgccttttcataggtggtgttccatacgactgcaaagctcaccaccatgcagtcgttggtttcgccatacctacgagaagcgtcgaagaacctagggtaagggtctttgaaggtagctttcgactcctccacggttacgcacctacggttgggaagcaatctgcaagagcttcgacctctagctcccggccatcgtcatcgaagtatccgcagtcgattagcgaggcctcataccagtcccagttgtcaacgccaccagcctccagagcttggagcttcatacggtcgcgtaacaggtcgattaggtcttctcggtaaataacatgtttcatttatacctcctctgtgattgatttgagaatactctacacggattgcagagctttgtcaagctcttgtatgcagatagatcggtagtggaggcagacctgtccctaggcttgccatacggatttttccgcctaagacatgcctctggtctgcctctcgctctcattatgcagatgagtcggtgagcggggagcatgggctccttataggctctgagctttcccctttcgggtcgtcgctgccctgttctcagattcgactcaggatgcgcttgcagctttcctcttcatacgctatactgctggccggtgagtgacgtggacatttctctccagcaggtcacccactttaccacggattattttcttgtcaaggctattgacacagcagaggaatccgtccagaatacaacgactttcaacaaaacaggaggaaacaccgtgaagatcgatattcgaaacgaggcggcagaggtcagggagattgtcttcggagatagtgtagactgtgcttgcagacttgaaaagagcgagtatactgacgtacctgtgtacatcgcagatggcttaccggggaatagtgggagttggatgccgatccgtgatcttctagatgctgagaatctgctacgagccttagaacgagctattgacctcggttggtttaacaagtaatctatcaaatctaacaatttttaacaaggagagcacgatgaagattgatattcgagagccgtcccaaaaagttagcgagatagtgttcgggggaaagactgagtttgcaagctcgttaataaagggaagagatagttcctcggcctatattgtagctagaaacaaagagggcatcacatggcgccgcgtgtcaattagcgaccgcatggacgctgagaatcttctcgcagccttggagcacgcccttaatctcggttggtttgacaattaatctagtaaatttaaaataaaggaggaaatatgagcaattcccaagaccgcgtactagcccgagtggtgcgtatcgacgatgtgaagacccatcctaacgctgacagccttgatctggcgcttgttggaggttggcagtgcgtaatcaaacgcggggagtataaggctggtgatctggcaatctacattgaagtggactccatggtccctgtagacaaccctatctttgaattcctgcgtggccgtaatatggtcgaacaaggtggaaaagagtattctcgaatcaagaccatgaagcttcgcaaagagcttagccaaggactgatcgtacctgttcatgcagcgggcagtccagagccgaaagtagacgaagatgttaccgatcgaatgggcatcctgaagtatgtaaagccttccgagcaggtagctatcaacggaggcaacaagggcagccggactggcacttccaagctagggttccccaacttcatcccgaagacggatcaggctcgcgtacagaatattcagatggcttacgatcaggctcatcagaaggacgagaagtttgaagtgacattcaaattggacggttcgtctctcactatctggcacaaggacggagaagtaggcgtggcgtctcgaaatgtcggtttccgtctagaagacgagaagatcgggttcttcacggctgtcaagaacttctttaagggtcgtggctggaagcgtgtgattaagaaagactccaatcacttcactgcgatggcagaagagcttaatcttggtgaacgtctccgggagtttggtctaaatatcgcccttcagggtgaactggttgcaccgaatattcaaggcaacttcgagggagttgacaaaccggaatactatgtgtacgatatctacaacatttcggagagtcgttactatcttccagaagagcgactggccactctgggaatcctgaacgcgctagctgatgacggcgaagaggatgttaaacatgtgccggtgtacatgtgggacgtaggcgttccaaaagacatgcaagatgtaattgaaatggctagcggagagtctgcgttgaacggtaagtaccgggaaggtttggtgttcaaaagcatgagccgagactttagtttcaaggttattagcaacgagtaccttctgaaggaggagtgaaggagggtgaagatggactattgggcctgtgcagatgctgtcgaacgggctgggtgtgaatgctgtggaagcattctcccggtcgaagaaattgtaaatgacggcggcatgttggtatgctgtgattgctattttgaaatgttctgtgaggaggaagaagttaatgagtaaagttaaagaccatatcgaggaagctcttcgcccagctagtcgggagaatatcaacttgggagacttcgtactaactgaacgtccagatggggagaaagttccggcgtttgttgtagttatagaaacgccggagcaggaaaagcgagaaggctatgtgccactccttgtgtattttggcaatggtagggtgggatggaggtcgtggaaagaagtctacaagacttctctgagaatcgatccaaggcttattggtacgtgcgtctgggtcgagggggctgaagctattagtcagcttgaggaacagggtgtcttctcgtacattgatgaacaagagcttatcaaaaagtgctacgatgcttggatggagtggcctttcagtactacaattgttgaagatcaagagccgacattcggtgaactattcgaacgagagtccgtcttcgagtttgttagcggttttaacaaaatgatgactggtcttgaggttgttaaccgcaagtggaacaccgatctggtcacaggcgagccgattaaacgtgatgctctgcacatgctgatgctcgttaccactgaaattgcggaagctgctgaaggcgtccgtaaggacttgatggacgatcacttgccagagcggaagatggaagaggtggaactggcagacgctatcattcgtatcatggactatgcgaatgtacggggtctggatgttgcaggagctatgatcgagaagatcgagtacaacatgacccgtgcagaccacaagcgggaagctcgccttgcagaaggcggcaagaaggtgtagaatgagcttgcaatatatggtgagtggtgatgagcacatcgacgactatgcaacgtatgagttgagttatcccgatctcaaagccacgtataaccgcctgtcgaagctggacgattccagcttcaaggcttctatgccagaggtattgcacttctgctgctttgtagcttggataaaagagattcctagctctattttgctgggagacagaggactgatacaccttatcgctcaccacattcatgaaggagcggaagacgatgggccacaggcttttaagtctctgaggcatcagttcaacacactaatgaagttagattaaggaggttttaaatggaattatttgacgttaagaaagggcaggttgttatggttggcagtctggacatagacattccgaggccgaccttcgaaaagaccaacgctcggatgaccggcgtagttgtcgatattgacgagggctcgatgcatcggaatgttaaagtgctgttcgacaacggggcgatggactggggcaacgcgtccgatattaagctactccattccggcccagaggctaacaaagttcgcaagaagctggctaagaaggttatccagaagcttgatgacctgttcgatgaagtttatcaagttgttcgctgaaaacccataacaaagagccccggtaagctttcgctcccggggcttaattattcttgtttttcttttattctccgctcaagttcgctaatcttccttttaagcgagtcgagttcttcatattgcaaacgggattgccgatcctgtgtgtacgaggccgagtttatctgatcctgtagtctgttcagtttgagttcataccgccgctcagattcgctaattcgaatctcgtaggtctggcgtacagagtcaaaccgagcctcgggagtcatcgctgtgaaagccagaatagccatacagacaaggagggagataaacaaagccccgactgctgaaactagcggccagtcttgtttccttgtcattatattgtctcccagtgtgggttaacgggttatagttattgagtttctgtatcccgacccttgacggcattcataatcaaaatcaaataccggttggtttcttgttgttctcttcttacgttactaatttcactttcaagtcggctattgaatctcgactctagtgcgttaagttttgcctcggataccatatctctttgcatcgcaaagatacgttcttcctgcttagaaagactggaacttaggaatccagaccaagccattaggatagcaattagcagagagataactccctgtgtagctaccttgattaggccttctttgccgtctttactttccatatagagccctctgctcttctgcccatagctttattgtctgtagttgactattgcacatggcagcactgttagtatttagaatgtaagctctagcgagccccttaactgtatcttgctccactcggtataccttaacctcctcggtcaggcttgtcgggggcacaataaggatcgtttggtactgcggaacagaaagctctgtcgagcaagcttgtaagagcagggtccagacgatccccagtagaaggctcagagatcgtctctgctgcattttcttgggtctcccttggggttgggttgggtagggattcgagttcacacaggtggccttgcagaagctcctgtcggttcttcatttgagctatatgtgcctctagtctcccagtggtgatctcacaccctgcccgctctttctggaactgctcttccatctgtcgagacgcagcttgaagagattggatatcattcttcgcaacagctaagtcgccgtacaaagagaacgacagatatccaaaccctgctgccattgcggcagctactacgagggcgtagtttttgagtttagttagtatcattttctattgagccatcttctatggtttccgaaatcgcttcctctactttaccagcagttacgaacactgccgaaattctcacaccgacagctaccagtgtagcgactgcggcgaatacgccgggaggaaggataggttcccaaagatggaccatggcctccagagccataaaagttgcagagcctacagcagcccagaacttccagcttttgaatagcttcttcattaggaaccttcttagatttacttgaaggattgataggcttctgctagcttaacatcgtagttgtttttcttgtaatccggcccgttataccttcttgcgaattccgcccagttcttggatttcagagctttgtggattgcaggattgatcttgatgaagcgtacaaaagtgtttagttgcgatccttcgctggcgtactgggcattgacaaatgcctgaacactcgcataacctagtgcctcccaatggaatcccataatctggaataggccccaagaggcactttgaagtgcgcagtctctatccattttgactgctttatctagacgttcgtgctccgcttgtccgccgaggtatcctccagctttagggttgcaaacgtcgtttatttcagggtcacgacctagcttccttttgagaagcttgaacatccagtgcctttcgaatagaatcttagggacgccagaaagtagaaagccgctcccacgactctctactttagtgacggcctttacactggcaacatcgactccgagatcatcggcagccgattggaagtcttgctcagttagagccatttttgatactcctgaattacagggtggaagtgatagcaaaccagttgaacgggtaagaccagttgccccagttgcagctaactctaaacccggtgttgctccacatatccgtcatgaaagcgcccgggccgatggagttgttaaacgtccccattacggtcacttgaacgttcaagattcgtgctggaacagggagttggatattcgtccttgtgtcatcagacagaccgggaccagttccccattgtagcagaaggccgtttggtagtcgagcccatcctctggaaatatccgactgactggactggaagtccatagcagttgtattcgcaggaagaccccatacatcgagcgtagccgctcccttcaaccctaggttgtttctagctgcttggacgttcgtgaggtcggacaggttatccccagacgacaggaagtctcctgtatttctagtagaagctgtgcctagccctaggttggaccgagcggtagcagtgttagccaatccagcaaggttgtctgccttcatcataaccgccgcagggtctgttgtagccatcccagtgaggcctaggttgactctagcttgtgccttgttaggtacatctgctaggttctgagcgctcctcaagaaataggtttccggctgggtagcactacttgtaattccaagattcgatcttgccagcgccttgttaggcacatctgccagattgctacctgccttcaggaatgtagaagaaggcatagtcgctgtatccgacagtcctagattagctcttgcggcagtgacgttagacagaccggaaaggttgtctttcttcttcagatacacctgtgcggccttgagcggactcacagccttggtatcattggctccagcttctgtctcgatagtcgtagcaactgccataaccccggctacagtctcggtagcaggaggaacgagagtcgatagctggctcagcgggatcgcgtgagttggctgtgtggcagtggcgacgctgaaaacattagagccgttcccgtgcttcatagcgtaccgggcgtcgccttcagctttactatacacacttaggttttgtcttgcaataactacgttgccaatcccagagagggtgttgtagtttgttacatgccgatcaaggttggcttgaaccttagctgcctctcccgcatcctcaaacgccactcgccaatatccggctgtaatgttcagagggtcagttggaatcttgtcggaatgggttctaaggcacttatagatgatcccgttagcgccttgagtgtagctcaggttaccctgatactctgtgacgctatcccattcgggaataccgtgctggttaacgtgcgcgttgaacaagtcttgcttgtattcaatgaagttggcagtttggtagggaggtagttctgtcacccatccaagcccaacttttacagcacccgggtcaaccttctggccgttttcagaccagatagcgttaataccagtaggcttcataatgtttggcatatattacctcgccttattctttaggagctttaggtttgctcttttcggatgggaagttcttgtgctctggccatttacgtagtgcagaacgatacttacgccaagccttctctcttacttcgtcttcatcgtcgatagcaatctctacttgacggtcagcccgggttagctcgttgtctctccacaatctggcttcaaagtcatcatatttgtcctctttttctaccacttccatagagccatcttcaatcgctgcggcgatcttcacgtacatggagtgagacgtagggcatccctctacagcgccgtaaggaatccatcccaattctggatggtttatttcgcactcgaaccccgctttaatttttacaacgtttctgaattccattaaaatcacctccagttataaaggcccttacgggcctattttgttaatctgcaaccttctggaacaaggtaatctggttagaacctccggctccgaacctacccatgcacctgtagctaccggatagcgtagttccgtggtagttgacgggagacgaagatcttagagacgtaccagctactacagtcccaacatccccacttccgctagctgcaatcgcaaagacatatgttcccacagcctgagcactacctctagaagtggcagccaagatttgggcatcagtcattacgtcagtttttctggcgtatacagagtctacccagttggtaagagtcccataagagccgaaagctccgccagtaaggttgccgttgctgctcataaaagcatcgccgcagtacacacggccagcagcctgcacgttcccggcagcaatcacgctgttgccagagttgacgttgccagacgaattgagtgtcgcagcattcaccctgccaactacagtcaagtcctgaccagccagagacatgcctgtcgcaccgcctgcggtcctgaagttcagagagttggcagacgggattccccaaataagccctacctctgctccatcattcctctggaatactaggtgagcgttaccagtgctggctcttactctaatatagtctgttcccagaacagcgccaaacgctgtaacgccttgtactgcgatatctcctgttccgctcctcacaacaatctgattagtcagattggaggcggatgccggaattgtcgcggagttggccaatcctgtaatttgtgcaacagggactgttccgtagtcgagctggcctagtctagaaaaacgccatagaggggtgttagtcgttgcgtcccagataccggaaacaccgttatcttgcaaccagaagtacctgctcttatctgcgttgtacagcacagtctgagtcgtgttctgtgccagcctgtcaaccatgagccgctctctggcttgagtttgagtagctcctagtccatactggtttcccgcgtggaacacaacattagagttaacccgcagagtggcgttagccgcttctggccctctaaattgaaataccaacgagctgtcatcaggagccaccaagctaatccaatctgtatcagatttatttctaagagccaactgggtagtcttatctgttccggtcatgttagctccattaatatggagcctcgctacaaccccggcgtagcttgtatctaggcccggcagaacaatgttctggcttccgtcgaacgctacgccgttaatcgtaactggagccctgagcttgctggctgtagtcgcgttaccagaaagagtggctgtaatcacaccagcgttgaagttaccagcagcgtctctatagaccagagtgtgtgctctgttggctggatcagccgtgatagtagcagagttagctaggcctaggaaggttcttgcgttagttgcatcacccgcgttgactaggcctcttccgaacgctgtaatgttgaaggtagccatcgaggtgtcggtgttgaagtacggaaccgcgttggcagccctagtcacagtagacaggttagacaggacaacagaactctcttgagccgaaatgtagtctctagctcccgctgcgttggctacgttcagcatgccacgtccataagccgtagagtcaaacacacctgcaccagatgcgctaatgaagaaaggaatccctccttctctcggagtcaggcttccaagtgcagagctagctgtggtaaagtctgcgaaagctcggacccagttagaactaacggtggccgggtcgctacctgtatgggtacggacagccttgtagacgaaaccgtttcttgtgcagaacgatttgtttgcaatatactcttgagtgctagtccactctgggatgcccttctgtagcaaatacgctaggttagtatcgtgaaggttccacttccagttccaccattggcgaggaaccgactgaataccccatccgccttgctgctgcgcaggggtcggggctaccatatccccgcctgtggaccaaatattttcaataggtagttgaccgatatcagccatttataactccttatgtcactaggttggtcagaattccaccaacagtgggatcgtttaggtctccaacgccttgtcctccggggaagccttctgtagcaaatacccggccagcttggaactcagtgtatgtgtagttaaccccgatagtcttaggaagcaatgcacctgcaccacctaggtcgaatagaagactacgctctacgttcgttagaatcttaccgatgccgatacggacagcagcgggagcgtactcctctaggaatacttcaggaaccccgaatacaaatttataagcttcgataacttgctctggggttgagtttgttctgttcttgatgatctttgctttcaggatcatccgatactcttcatcgctcggctctctggcgttaccagttggagcaccgaccgagtaccatggagcaccgaccgtagggtccgacaggcttccgaaagaacctgcacgctccgttccagagaatccaaaatagttgaaaatatcttggtacactagaccgcgtggtcgccctacaatgtctccgataatgtccagttgcttcccggtggctgtgtccagagaccggagagtctggaggtcttccagtgcattctggatatcaaacttaccagacaatagcacttgcaggaagcgatcaaagatcggcttctctttaaactgttcagtgacccgttcccgggccacctccagataatcttctctgtcaaattggttgacagccatggaattctccttctatcattacaccgtagttacggtgatatctgctgcggcgaatgtagccacttctttgaacccgatctcgatgttcgccatgccttgagtctgtcctttcttggcaatcgtcaggctgttaacttggaagcccgggacttccatgattggagcatagaatcgagaataaattacgtcgtctccgatcttgtaattctcggtcccgtacgctacaatccttggccgtaggatatcttcaatgttctctggcatcgatcctgtgtttgttacactgatcttgatctcgattggaacctcgacaggtcgctggtagttgactctgtgagtgtagcctagactgtctactacctgaacctctgtatctccgacagaaccaatcccgaatggcttgttcagccagatggactgtgcaacctctgtaggaataccaccaagaacgattggaaggaacgagtgtcccgggactccatgaacggggtctgggttgtcggtatcgttttcaataatcctaacatcctctaccccttctacgttcatcagaccgtcgattagggactccagaatgttggtggcttgtacgaatttagagtttcggaatctctcgcgaagctcatcgtcggtctcgcgcagacggccagtgatagctggaacagggttgataacgctgtcccatccggcaataggaatggagatcgtatcgatagctagagcttgctgaggcacagggccaataacgtcgtcaacagcgataccaagctttctaaccttctgaatactcaggttggaggcttcttcgaaagtcttggtgttgaatgggtcaataggtactatgaaaagtataccattctgttcgtagcttgtcaaggtatttccgtgatttgtagctacgtctgcggccagtcctgctaggatggactcggatgttactgtaccagtggtagggcttgtgtacttgatagacgttgtgttaatgtcatcaacgtacatcttaagctcgtatgtcaggtcgttgcctactgtctgagggaagattccaacaccagagcagcccttcgggctaaggatgacgccctgaagcaagtggaaaactcggcctgtactgctggagatcatcttagccggaggcgagttgataactgtgttgatgttaccctctaggataacttgtgctctggtagggcgagccggatatctgctaatcgcagagaaggataccagattgtccagagctacaccagtggcagccgaggggttgaacgagttgtaaaccatctggattacttcccagattgcctcgtccgatggagcaactacaccgataagacggcctagagcagagttaccagacgtgtcaacttcgtctccagttgaaactaggtcggcgaagacctgagaggctacgtttctgtagtctgtcaggatttggtccaagtctttaatcgttagaccttctgctgtaattccagccatattaaactcctatcattctgaaagtgatgggaagggattctgtattgtctgtggttctgactgtgaactccatggagtattcacgtgtgtgagggtcgatccccgactgccaagatgtaatctcaaggacgccggggtctctcataatctcagattggaatatcgcgtcaacagcgggaaggctcctagacttaccaagaatcctctcgaagtaggggatgccgatcctatcatccaagaaccactcacctaggaatgtgtacagtttgatctttagtcgctgagcaacaatatcaaccattcgttgagtgactggagcttcaccatttataaaaaccaagtcatgtgtgtcggggttgacaaacaagtccatatgatctcctttaagcttgtgggacagcagtaacaccgccgcccggcataacaccaccgtgtttgtgagtgtggaatggaataccgttgaatgtagaagttccaccagtctgcacgtagttgcctgtatgtgcaatgttcccgttccatgttgtatgtgctgcatcgacagtgagcgaagcgcacttgacgttgacattttgagcattaatgcttatagtcttacggctgttgattagaatatctccgttggcttttatcctaacctcggcctcttgtccagtcatcaggttgtgggcaatagtgaggtctttggtatcgtgcggccaactgtgtcttgcagggtcgttcatcgatctagggaatgtgaacagcccgggaatggcaatggcatccgccatgttgaacttacgaagatcgtttggagtgtgaggctgtccagtggcagagcctttaaacacgtccatagttctttgagagaatacacacaacaccgtatccccgacattcaatgggaagctgataagggtgttagctgttcccggcataatgacagggacagatagaatctctggttgttcttctgatgtgccgtctttgtacaggtcattgaccactggtctaacatcgacagaaaggcgtctaaaatcgtccagaacgcgcaataccacacaaggtatggcagtatactgtttcgagccttccgtggacgagtgcaggttcagaagctcttgtaggcctgttctcctcattggtcaatatcctcttggttaagatcggaacaccaacattcagtgtaccattcgttgtctctgtatccgcccgagattcggacgttgttgattctgaaagttcctgacaatctatccgactctacccggacaagaaccccgggagttagctcaggattgagaaggcatttgaattgaacgcctctccgtctccgcttatctttcttctgtgccgttccgctggcactggcgtagaatgggatatcgatcagaccggtctctctgtttacgagaggagccatttgaacactcttcgttgttggtccgttaacgtctgtgacgtttagaacgtttccactgatgttccattcaatattgttggcttcacacacgctgtttagagcgtctttggccagaccacggagttgatagccgtacatgatcgggttattgcaattgaggcctgtataagctcctctgtccactcccggcatttgaagacgaatctcttcgataacatcctttacagttttgcccggagatactgtgcccttcagcttagtctcagttagagcagtgtaaccctcaccaagaataagctgagtcacgtagtcgtttccactctttcttgtggatgtttcgacaacattaccatctagaacaacggaagttccagcttctttataccccacttctagtctgcaagtaaggtattcggtttcaagaaggtttagagttgcaatcgacagattgtatatctcaacagtagccgagttgccgctctttttgttatcggagcttttagagatatcgaacctgaactgaagtccttctctgttaacacttccgtcaggatgaaggtttgtaatctctactccctgaccagactcagtattaccgagcgtcaatttatatactctgtcgtattgtctcactctgcatcttcctccaaatcaacattaacatacagaagttcaaaaaactgaggtacaatgtcgcttgcatcgtgcttgtacttcacctgttctaggttgacaggcatgagcaagaagtacccattaaacccgatgtgctgcatcgcgtaatctgcaattatcgggtattgtggaatcaatgccaaccctgttaggattggattaagctcctcgtcgaatatgtccatgtgccactgcctagagcggctattccagtaaaattggaggacacgggaaatgccctccagagctaccgcgtatctatacttcctatcttggtacaaaggaagtgtgtcgatataagtcgtgctcatttagtttacctcgcaacctgagttctaatctgagcctctttcatttgactacgcttgaatgtaggagagtcttggctggtagcattgctagccccggtatcaccttctttggcgtctctcttttctttcttagcggtctttctacccttgttaaccctcacctcgacataacgagtatctgtgaatgtcacagcctcgattgtcatacgaggttgaaggctgctacctgtctcggcgttttcagtgaaagacaaatcggtgaagatgcatctttcgatttgatcccagatgataccttctcggaagtccagcaaactgaagacctcagcattacgctgcatgtcgatcagttggcgctcaatatcataagcgactttatcacccttttgagggaggacagttgcagaaggaatctcaggaggaataaactgagtaataacttccgggaaaattcggctcggatcaaatctagaagttgtgataacagccggcacactgaccggctgcgtattcacgaactctttgttgttgatcttgtatgtctgggcctcgttgtcgttgataacgggcctgttcaagttgaagtctgcgtctgatacgacggctgtaagagtgaagactgggttttctgtagtaatgtggtctgtgatttttcctcccgtttcgattgggttggaactcacagagccacggtactgtcttccgaactctgtaacagcgtcgaaccagattaggtctccgttctctcttttgatagcaattgtcattgggattccttataacttgccgaagctctggagatttcttcctcaagaacgttactaacgatctctcgtactcgctcttgcgcttcagttgtcatgacgttaccctgagcatcgataccagaaacattgaggttgaaactaatgtcaatggcactcttcttgagggcaccctccatttcgtttctaacttgaccacgttgcatcatatacccaaactggtctggagtcaaggactgggttgcacgggtatgagtctctgtctggatcgcgtcaatgttctgagctactagcctgtcaccgatgaaggtggccttgtcttttgcatcttccggattgaacatagcgtacatcgtgtcgatgttcgacattatagtacttctgtctcctccggcttcagcaatcttagcgtccctgtacttgccggctattgcgaatctctctacaacactgttgaagaactccatgatggcagcaagttctctcatcgtgctgaccagcatttcattgaactctagacctttgagcgcttcagctagccccgggacaacagagaagataccgtcgagattgttcttcagttcactggattcactggctagcttttcgaatgtctcggcagcttgtacgttgttgttcaagaagtccccgaacaccgaatcaccgccttccaagaagacaatgaagtcttccagtgccaacgcaccccagctaatagcagagatcaacctgcccataggggtcagcaaggctagggtttgagccgtggtaaaagtcagccctgtgccggtcatgttgaactgcttggcaatgttctcccactgggaaccaagctcccctccaataccgaccagagcgttgacaggcctcataagagcttcgaacccgccaccaagtgcagttaccagaggaagcgcttctttcatgccttgggcagcaatcttaaagaagtcactcatacctctatcgaatccgccagcggcgaatgcttcgatagtgcggttccatccgaactggaatcgaccttgctgagctgcggtgccttgcatagcagcatccaaagcgccacctttacgggcttcttcagcgagagttctggcaaatggaatcagggcatcacttttaagcttcccgtcttccatcgttttcatcagttccgcgatagtcatgtcttgagacttggccatcagagctacagcagcggggaatctttcggccaactgacctttcaattcttcggacataatctgccctttacccatcatctgctcaaccgctcggaaagagcctttcatcgcttcgccgtcaaggcccatcactcgaccatattcagccatagactggaagatgctgtcaacttgttccttgctgaaatccgatgcctgtccagcagccatcatcttaacataggagctaccaagggctctgtcgtcaagaccgagacgctgagagatatcgcggagggtggcttgtagctcttgaccaccctgtactccaccaccgacagcttgcatggccagacgttgaccttgcagttcttggttagcacggttaagctgcataatagcgaacgcaccaccaaggccgggaataaacccgcgtccccacccggctagctcgctaccaatccccattcccataccttgacggatatggccggcagtacctctcgatccacctgcaccacctcctcggatggaagactctaggtcaatgcggattctcacttcgcgtctgatttgctcaagaacatcttgaatctctctacgaagatgggcacggtctacagacagcctaatttgaggcgtagcgacagcaagaccgtttagcctaccctgcacatcccttagtgtgtttcgtgcattctggagcaatttagagcggctaatgtctgcattcagatgaattttaaaacgactctctgtgcgcttcttccattcatacagcgtacggctagcctgagccaagcccagttcaaccggtagatcgaccttggtctggccgagagccgtctttacgaagtttttctgatctcggataccgctaaggtctagcctaacagacttcaacctgatcggcgttgcattcagtctttcttgaagcttctcagagataagacgaacagcggcagcatctaccgcgatgttcttcaagactaccctttgagtggctgccttggcaagctcctctctcagagtttttgtatctagagttagcttaactccaaaccgcttgttcgtcagcttggagaattctcttagccgggcttcgaccccagcgagcttcttgtcaaaagcagtgagaggccgggaatcgactgtaaatttaagttccccagttagctgggcaatcctttctgtaatcatttcttatcagcctctgcgtgttcttttgccacttgagtgatagtatcgtgaacgtctataacctcaaggatgttgtacaaatcttctgtagtgaggactgtactcagttccccatacgtcgttagcttgagagggtgagtgatagccacataaatctcccaatgctgcgagaacttctggtgggcctccctaaccctccgatcactctgaactcgatcagtagtgactgaagtctcggactgcccatccccggtctttataccgtcggtgcctctgcgaaaccgattagagaaaaaaccgagccgaagttgaactcgatcacgtcttttgtgagtgcgtacagcaggtcatacttgccagcgaattcggtgtcgaaattgattgccatcgaacctttgaaaactgtcagcatcagattctggatcaaattctcaacaggaaccttgtcgatgttatcgaacagttctttcatggctccagagaagtcgtggtcagcttgatacttggcaagggatggacccagcaagctggttagctgcttcagtacgctgataccgcgagttgctggcagaaggttgatagtgtattctgtcccattgtggatgacagtacgttggtttccgaacataaatactccttatttatctgaggtagctaagagcgccttgaacagttccaaacacgtcgaagccgacttgctggtttccgcctaccgtgccatcggtccagtccagaacatcaatagtccagaccctgttctcgattccatcggtgaatgttatgctagggtagccattgacataagcgttgtctgtgctcatcatggtgctaccgtgggtatccttgacagacaaggtgattcgggcggattgtgttcttcggtcttgctctactagcgagaataatgcatcattagacaccgaagtctgaagaacctcgattctaatctgcgcagaaaggtctctattgaagacccgggtgtggtgccctctgattcctcgaaccattgtgtagggtctcgaaagccaagacatttcgaaagaaactacaccagtgagagcatacccacaaaggacaattttaacatcagatgggctatatgtcaataccgtgttagccattagaagcctccgaattgcgtaagggctggcagaagagagcttcccagcaggatagcttgctcgaccaaactttgatcgacgtttccgccaatgttcatggcgacctcagagcaccctagaatccaagtgcgggtctccagttgtccagagaaagataccctaggtaggtcttccacccatgctgtcagagctaggaagcttgtagaacccttcgtgtccttaatcatcagtgggaattttcccattcgggttgcaatgtccacgttgtaaagcatcgaaaggatatcattggtcggcgaggattgcatgattgtcaactctactcgccagccttggtctttgttgtagacccttgcgatttcaccatccatcgaaccgtgcttgatgaaaggcttaatatcttttacaattctgataaactctccctctgcgtaccctgtcacggaatggataccagcgagagttacaaccacgtcacgcggcgagtaggtggtaatcaatttctatcctccagaaacaacaaagggagccacccgttaaggcagctccccgtcgatgtggcataagcgctatattacagccagcgctggtctagtgtgacacctaggttacgaagagtatccgcatcacccgggctcagcttggcgttaccgccgattagagtttgcaggttgtgtgcatgaataacccaatcgcgtgtctgcatgctgttcgagaagttagaacccggaacaacaccgacataggcgtcatcactgaagtagtcggaacgaccagagttgtctttaacgtggattgtgaacaatccctcagacgaacgacgggcgtcgtcgtagttgtaaagagcagtcaggaagtcgttcgaaggcgaagtttgttgaaggctaacagttagagtagcagacttagaggcgttgtagacgcgagtcgatgtgttgtcggctccggtatacatcacgtaagtgtcagcgtttctttcaatgttaacgatactgtcttcgctgaatccgccgagaaccatgctctcaccagttgcagggtgagtgatgacaatggtaacatcggctggagagaatgtagctagacgttgaacagccatttatgagtctccttatgggaaggaccagacttatacagtcacggtccctcggatgtgtacaaagtgaatcgcgcctgctagacgggcttcaaactcgatgccttcgaagatacgctgtgctctcatgttcggagacatggatagaacatcaggtacgaagactttaggagctggagcttcagccagaccaccaacacgaattccttcgttaagctgggctctgatttccgattccagaattgttgcaccaacagagtcgtaagggattttcttggagttggccatgcggaaccacagacgctcggtcatgcgggcttccagccaatctacgaagatcattacgtcaatccattcaccaccggccatagccccaccgaatgtacggttgacaccaccaacacgctcgaacgtggtaactttcttgttcttcaggttggtagactcggttggagtcagacggtaggcgtctacagcggccagagctttatgggtccatgtgttgctacccggttgctcttgcagttggtaccctacccaagcacactcagggaattgagcgtcagcgtttggatggtaaattagagccgtacgttggaacccggcagcaaccagacgagaagcaatgtcattctctgcggaagtcttggtgttagcctgagcagtggctccgataaacactttcttggtgccctcgatatgagtagctactgccatgatatcatcatcggcgtggctgtcaatgctcagagcataccattcgtcgttttctccttgaactgctgtgatagcagccggccaaccttcagtagagggagcagcagccatagtcaggttagaagaaaccttcaggctccagtcttcgttagaagcgacggttagagttccgtcttcgttgtctgtgacggttacgccggctaccggagttacgtcataagctgcctttaggcctgtggcaatcagagtagcagtgtcgtcttgctggctgacgtagctgactggtagtccgttgacggtcagaacgtagctctggccttcctgaacaacactgacagatacggtagcagaaggaacttgtctacgaccgataactaggctgcgtggcttgagagcttgaccgaagtagcgaacagcggcaagatatgttggatcggattctccgaagtcttcagcgacacctttcaggctgttgtagactctggcacgttccgagaagtttgtgtgagaagcgatgaacagaggaacgttgaagtttgtctgtgcgacagcagcagtctcacggctgatctgaatgtcaattacatcagtaagaacagtcattcctgtctcctattagtgttcgaagtttatgtcgatgtgggactcaataatgtgacccgggcgaccagcgtcgtaataaacgccgtgaatatcagccccagcagcaaactcttgagttgtggtttctatcacagagaatccaaattcacatgtaacttgatagaacatgtacatatctgtttctcttagcataggaactcgtcttgtgctagggagtttgaaaagggatagattaaactttctttgggcggcgtgtcctgctggagtacgcagagcccgagtaat

SEQ ID NO: 9 - DNA, 62484 bp, Unknown
  source: /note="Description of unknown: bacteriophage strain capable of infecting bacteria of the genus Pseudomonas"
ttcctggaaaccaaggtcgatacccgcaacaacggcgccagcaaggtgatcgcacacaagctggaaaccactggcaagtacagccccggtcgctggctgttcctggacctgtgcttcgaaggtggcaacgaaggctacatggccctgggccgcaagatcgctggctcgatcatggaagccacgaacgtggacaacctgtcgctgaccggcgccgaactggctggcaagatgatggccgtccgtgtgaccgtgcaggaaagcacgcagaccaacgacgacggctcgaagaagctgcgcaacaacgtggtgggcatcatgccggtgtcccagctggaagcgctgcgcgctgaacacgacgccaaattcggcactgcggtgaagacctccggcaaggccagcgagccgaccaagcagaacagcaccccgaccggtaccctgcccccgccgtccttcggtggcgctgcaccggcccaggaagccccggcaccggctgcggataccggcgtggccgaagtcccagcagcgttcgcccagcagccgtggaacaagccggaagaggcagcggctccggcccaggctccggtcgctcccccggtcgaagctccggctccggttgccgctcctgccccggccccgacgtggcagaccgatggctggacccagcacccgagcagcgagccgcactgctacaagggccaggtctgcaagaccaaggccgaggtcgatgctgaactggccgctgcgcacgccgccacccaggccgctccggtcgccccggctgcaccgagcgctccggctccggaagccacccctgccgctggcgccccgccgtgggcctccgctccggctccgtaagaaaccggcctaagtaaacgaaaccccgtcagcgatggcggggtttttcaggataaagatatgagcgatattgttgacactgccgccgcaaccatcgaaattcagaccgatgctgcaatcagccgcgttcgcggcgcaaccttcgaagtaggccagcccggcgaatgtgacctctgtggttatgagttttcccgtgtcgttgaccgaacctacaatggcgaacctgtgaagtcgtgcggtgggtgccgcgacttgttcgcactggataagtgatggcgatttacatcgcagacaaaaccctggcagcaatcaaccgcgtcatgactgctgaccaaggtggatcgttccgtgagtgggaaggtaagatcatgccccacatggatgacgcatggcgcggtagcgaggaacccttccgtagccacatgggtgcttctctgatcggcggcgactgcgcccgagcggtgtggttgtcctggcattgggttactcgaccgaagttcgacgggcgcatgcttcgtctgttcaatcgcggacacatggaagaagcccgcttcctggctatgcttcaggctatcggatgccatgcggctaatcaggacgagaacggtaagcagtggcgcatcagtggtgggggtgggcacttcggcggatcgggtgacggcaaggcattcggactgcccgacgtgaaccacggacaggtcgtgttgctcgaattcaagacccacagcgagaagagtttcaacaagctggcgggcactggatggagtgcataccttgaagacctgtacgctggaaagaagggcatgttcaacggcaagggtgttcgcgaggcgaagccgcagcattacactcagatgcagatttacatgcgcaagatggggtacgaagtaaccctgtatgcggcggtgaacaagaacaccgatgaaatctacatggaactggttctgctgaatccggaacatgcggatcggtaccttgatcttgccgagacactggttcgcatggaagaggcccctaagcgaatcagcaagaaccccggttggttcacgtgcaagtggtgcgatcaccaacgggtatgccacaagctcggcggtgttcctgatcgcaactgccgcacatgcaagttcgcaagtccgatcatgggcaacggcgaatggctgtgcaagaaaaccggggaaattctccccaaggaaaagcagttcatcggctgcactgagtacatcgtcaacccactgatcactgactgatatgaagctccgacactaccagcaagacggcatcgattcgttcatcaactacttcatgaatggcggtacgggaaacccgctcatgtgcttcccgacaggaaccggcaagtccgtcatcctggcaggttgtattcgtgaagtccttagccgatgggcgggcactcgaatcctggcgctggtgcatgtgaaggagctggtcgggcagaactaccgcaagtttgagcagctgtgccccgatgtgcacggcggtatctactcggcaggacttggcgaaaagcaaaccgaaggcaccgtcattttcggtggcgttgcctccgtcgtgaagaagatggacgacctcatggcgacaggtccgttccatcttgtgttcgttgacgaagcgcacatgatttcgccgaacgatgagacgatgtatcggaagatcatcgagcaaatcaaggcaaagaatccggcagtgcgagtgatcggcctgactgctactccgtggcgtcctggccttggtcgtatcgatgatgaaggtggcttgttcaccgagaccatctgcgactggacttcgatggagaagttcaatcagctgattacggaaggcttcctgtgcccgctcattccgttcagcactgaattggtcctcaacgtcgatggcgtgaagactcgcggcggcgacttcgtagagaaggatttgcaggatgcggtcaaccgcgacgaaatcacccgtgctgcactgaccgagtgcttgcagttcaaggacagccgcaagtcctggctaatcttcggtgccggtgtggaccactgcctgcgcatcgccgaaatgctcaacgaaatgggcgtcagtgcgcgtgccgtgtggtcgtctcgcaaggtcaagatggttggacccgatggccttccggtggtcgatgaagagacgaagaagttcaagtatcagaccatcagctgcccggattcggagcgcgatgccgccattgcagatttcaagcgcggtgacttccaggccatcgtatcgaacggcatcctgaccacagggttcgatcatccgcccgtcgatatgatcgtcatgttgcgtccaaccaagtcggttacgctgtggattcagatgctgggtcgcggtacacgtccgttcgatcccatgctggtcgatccgatggaaatcaacatcaacttcttcaatcaggccaagctcaacaccctggtgctggacttcgcacgcaacaccaagcgccttggctgcatcaacgatccgtacatcccgaacaagaagggcaagggtggtggcactgcaccgatcaaggaatgcccgctgtgcatgaacaacgtgcctgcgtcggccaaggtctgcccaggtatcaaggtaactaccaacgagccgtgcaactacgaattccctgtggctacggcaatcgagaacaaggcaagcgaagaggaactgattaaggggaacatccccgaagtcaacatgtttcgaatcgaccacatcagctatgagaaatacaggaatccagccaaggggacctcgctcaaaatctcatactcatgcggcaataaaacgatcaatgagttcgtctgcattgaatacgctgatggcgccagaaagatggcagagcggtggatgcgcgaaaaccttgttggcgggttcgctgcgtcgaagacgattctgacggtcaaccaattgctgaacgatcttactcagatcaagacgccaacccatattcgtgtcgtaacgaatgagcgctatccgcgaatcgttggccggtgctgggacggcagcggattcggaacggaagctgaaccgacccccatgccagctattgacggtaagggggatatcatggaaactttatctcaacaggcagcggccttcttcaacaagccgacagccccttccacttacgatgacgacgacattcctttctgagagaactgagcaatgggcaagagcgacaattacaaggtgaagttcgtcaacgagaagaacgtggagtgcgttgacggacaaccgaatttcacccgcaaagctgcgaagcatcgtgccaagcagctggcgaacaacaacttcaagctgacggatttcgtcatcgtccatccggacggccacgaagaaatcctcagtctggaatagtattgctgaggggtggtcttcgagcaccggggctgacgatctcgccagcctacgcgtagcacctacagggactcagtgctaagtccttaatgatccaccagcatgcgtcagtgtccccgtagacatgcactggcgatagcgacgacaacatgacgggttttcaacgattttaccgtcatgtgatagcacccgtggaagaccgtaataatttgcgcgggatggtggatagagcaggaaagtggcgaccttgccagagtaggttgccggtgcggtgtgtagcttaggcgaaagcagtggttgtccggggtgcgccaaacacccaacttgatctaaacgggacaagggacataattgggttgccgcccttccatcaacgcaggttcgacacctgccacaccgcgccctttagaaaacaccttgattccgcaacgcactccctgatctacgtgatgggacatagtgggcaagtcggcagggtgttttccaaaggggaacgtcaacgggactggaacccttatgcccgcctagtctatgattgggcgggctttttacatgaccacaggaggatgtatggaagaccatgagtgtcaagagtgcgggctgacaatcggcgaaggcgagtacgaagagaacaacggtgtatgcgacttctgcttcgaagaattcggcgaggtctacgatgattgacgaactgaagttcgtacagggtgctgtcggtaaaaccgacatgctggcgcagatgacccacttctgcatcgagaaccggcagatcagggcaaccaatggccgcatcacgattggcgcaccgattgcgtgtgatctgactgtgaagccgaaggccgacaagttcgtggctgcgatcacccaggccgaaggaaccgtgtcgctgactgtgaatcaggccggtaagctggtcgtaaagtccgggcgcatgaatgttcgcatcgactgcctgacagaagacttccactacccgcgccccgatggcatcgcccgacagatcgacgggcagggcctgcggaaggccctggatacgctcaggccgctcgttgcggagcgccgggcaccgcaggagtgggcgaagggcgtgctgcttcgtggggcctctgcgttcgccacgaacgggcatgcggtcggccaatactggatcggcaccgaattccctggggaagtcgtgatcccgctggatactgtggccgaaatccttcgcatcaaggaagcgcccaagcacgtccagatcgataacagcagcatgaccttccattacgaaggtatgaagtgggtgcgtactgcacttctggctgcgcgatggcctgagaactctgctatcgaagccatgttcgccaaggaacggggcaactacgtgccgattccgaaggaggcgttcgagaccgcgaagaagctgaagaagtacatcgaagacgatgggttcttctacatggatcgcggcgaattccgaagccacctgggcggggatgaaggcgctaccatcgccatcgactttgccccaggactgttccgtctgaagttgcaggacttccttgatatggaagaatacgcaaccgaaatggaattcaatgagtggggtaacaacgttccgctgtacctgcgcggtgggatgttccggggagcggtgcagaccgtaaacccgaatttctaaacagcagtaagccgctacgtcccggcaataggactttattggagaagtaaagtgggactgtttttcgagacacctgagcgaaagaaaaccatcaaggtccagcctccggagccagtgtggctacgggatgactaccttccgaacctggaagaggcccgcaccctgaaggacgtttcgttccttccggaagccgaactgtggatgagcaaagccccgctcatcttcgatattgaggttatgccgaactacgtcgagttcggattcatggacgatgatacggggcgcgtttacgtggaagagtcctcgccgacaggggacgacccgttctgtaagaacatcaattgggacaagctcgaatgggtgatgaagaatcgtctcaccatcggcttcaactccaagtcgttcgacttgccggtagcgctggttggcctgcatcaccgtcgtattgaggcaatgcgcgaagctaccaagatgctgattgaggatgacatgcgcgtgcatgaagtcctggcgcatttcggtatcgatccgaaccagcttgatctgttcgaccatatcgacttgatcgaagtggcgccgcttgacggctcgctgaaaatctacgccggtcgaatcatgatcgagaacatgatggacttgccgttccttccgaaccgctggctttccagtgaccacaagtcgatcatccgctactacaacattgcgcgagacttgccatccacgcgtgcgttgttcaacgtgctgaagccgcagatggaactgcgtgtgaagatgagtgctgaatacggcattgaccttcgcagcaagtccgatgcgcagatcgcagaacacgtcattaagcatgaactgcgcaagattctcggcaaggtgccgaagcgggcagagattcccgcaggtacgcgttacaagtacgaagcgccggactacttgcagttcacctatggtccgttcatcaacgccttcaataccatcaagaacgccgacttctacatcacggagtcgggcggatttgaaatgccgaaggagattgcggacctcgttctcgaactaaatggcctgggcttcacgatgggtctgggtggtctgcacagcactgagtcctgtgcggcgcatcgggatgacggcgaataccagctgtgggactttgacgttacatcctactatccatccatcatcctgctgctgaagctgttcccgccgaagctcggcgaagcattcctacacgtttaccgcaagctggtgaacgaccgagtgaatgcgaagaagaatggcatgacgatcattgctgacagtctgaagattgttatcaatggatcgttcggtaagctcggaagcaagtggtcgtccttgtatgcaccgcttctgatgattatcgtcacgatcaccggacagctttcgctgctgatgctcatcgacatgctgaaccaagtcggcattcgcacggtatcggccaacaccgatggtgtggtcatgaagccacataacagccagatcgcggatatgcacgcaaccatcaaggaatgggaacgtcgcacgaagtaccaaatggaaggcacccggtacatgggcctttactcccgcgacgttaacaactacttcgcagttaaggcaaagttctgcaaggaaactggtgacttcattcgtgagatcgatggcgctaagaccaagggcgcgtactacaacgcattgtcatcaaagaacgcatccgaccagctgaagaaaaacccaacaaacatcatcgtgtcagaagctgtggaagcctacctgaccacagggaagtgggtgcgtgagactatcgaagagtgcgacgatattcgcaagtttgtgactgtgcgctcagtcaagggtggagctgtctacctcacgaactatgatccgccgaagcacgccagcaagatggccctgatcgaacaggcaggattcatcgtcagcagcgagaacggaatgattactcatcccgacttcatgcaggacggattcccttcgacggtgttcaccctaaacgacgcctacaacagggccttcaaggcgctctcatcacacgacacggagtacctgggtaagtcgatccgctggtatcaggcgaaggctgcgctcggctccctggtgaacgcatcgtccggccacgcagtaccggattcggaaggtgccaagccgctaatgagcctccccaagtcgttgccgtgggacttggataaagagtggtatgtcgcacgtgctgaacgagttctgaaggagattggcattgtccttgactgacgaaatcggcgtgcgtaaagtatgcctcgttgtcaccgacacgcagattgtagcgctggcagcggcagtagctgccgccaccgctcagtacgcagcgtcggctcgctgttccagctgttcccagcctgaccgggaccggctcaaagcgagaagcgaaagcttacggaagctgtacgaagacttaacttccgaagaaagtagttgacagacgcgaaacacctctctaagattcaagtcctcggaacaacatcgttcccaaccccggcggaataaaccgccacctgcaaacggagttacacatgagccagttcaccatcgcccccgtcgcaatcccgcagaagtcggtctccatcgccccgcgtgacagccagtacccggtcaacgaaatcatcgccgctggcctgggcaacggtttcgccgtcgaactgcgcgacaaggacggcaacgtgccggaaggcgaggccctgaagaagctgacctcgcagaagcagtcgcagttcagccagctggccgcgacccgtggcgtgaccttcaccacccgcgccctggacgaagcctccgccgctgccttcggcgttaccctgcccgccctgggcgtgtggtacaccaaggccgagcgcgccgagaagaagaccaaggccgtcccggctgtcccggccgctccggaagccgacgccggtgtcccggaagtcccgaccctgtaagtgccggcctagcgccaagcgataagaaaaagcccccgatttcgggggctttttcttgcttaggattcggtggtcggttcgggctgcggttcggccctggtcacagtgaaggtgtagacctcgcccagttcctgctggttggcctcatccttcggcacgcgaatctggaactgcgggtacgtaccattggtcggaacgtaggtcagcattgcggttccactgaacatggtgtcgcggtagtcctgggtcagccgggcttggaattgcatggtggttctccttcaggttggtactgctagtgtggtcatctagtgaccggttacatcgacgtaaataaatgcgccgttttgaatgatattctgtggagtaggcattcgtatttcgccctttgacggactgaaaacatagatgcccccgcctgggttgtatacgccatcgctggtggccccataccagtagctgagagttccagttccgagagggcgcgagtatcgtgccgattgaatagctgcgatctggcgacctgggggaattgtgaagccttcgttgcctgggaatgtgccgacattgacgcttcgctgggatacgccaacaacccgcatcggcttacttccgctactgtatgcgtgagaaccgtcaggtagatacagttcaatccctgagtttgtgccagtcggaacgaatgagtcatacacccacaaccgtccagcgactcggttagagaaagccgatagtgcccggactagccagttcccatttccctcgttgaccagctgcatgcccacagagggcactgaattgttcgcgccaccgtagttgcctaggtgtgacacccaagctaccatgggtgtgttcgcctggaatcgaatatgagtctcacgggtaacgaaattacccgactgccacacaactgccccggtgtcgttgaaatcaatccggtgcctcaaatggaatgcccggaagtcagcactaagctgtgcatatccggtttcagtccacgcttcaaatccgctcatttaagcccatccgtaataaactagacacggtacaagttggtattgtggaacaccatcaccgcgagtatcggcaccccaaatcatacgaccgttttcatatcgaatctgcggcagacgcaagtcccaatttgcaggagggacgattacataaatgaaatcgccatccagttttgtgactggtatggaattaccgtggacgctatctgtccaggccatccctgttagaccacccgttcgggtggtcacatccagttccagggttccgccgccatcaaagcactgaagaccagtgggcatcaccaaactcccattcgaacgcgaaggacgccgttgccatcatacacgcgccagttgccatccgaaaactccgttcgtgcgccgccttccggtttgctgatgcggaacacgtcagcgataacgtcgaaggaggaaacggtattctgcatggagagcttcagaccagcaatgcggttgtcagtccgcatgttgatttcccaggaagctcgggattccaaaccaccagcattccaacctgatggcttggtctgcgcttcgggagattcttcaagcatcggttggacccatcgcaggaatgaattacctgcttgtcctgccctactcttgaagatgacacgagcataagctgtaccggctggagccttaccgcgaacgtaaggacgaacgtatccgggaaaaccaccgccgccaggaggggtaatctcggaagtgctcattattcccaacgtatgatcatcccatcgcttccattcgatagtgatttgagcgaagcgaagagagcctgacacataggccgaaaccatgtagtcattgccttccttaaccggaacatcgagccaactccacacgctaccagccttattcaatacaccggcctgaatcagcgcgaagcatccgtaagggataccactatcgttataccactgtccctgatagttgttataacccgtgacgccatcaggggaccaacctcccattcgatttgcaatagctgtaccgtcagcgaagctagcgttttgcatcagattggtattgccgaccgtggaaacgctagcttcaatgcgctggacaacactagcgtcagccttaccgtcaacggacgctacaacaccatcgactcgctgggagagggtagtggtcgtgtccttcgtctgcttgatatcggactgcatctgcgtccacacggacgagttgaagtcacccatcttggtattcagctgggtaatggcctgtgcgttggcactggcgacaccttcaacggtctgaacccgtgtggtcaggccgctgacagcacttgcagtcgcatcaatagcaacagcattggtgatatcgtatgccgaaatactgtcgattcgagtaacaccgccattcgggtactggtatacctcgatcatgtacccattggtgccacctgggaacgcatcgaagtcgtagttcttagtatcgaatgccgcaccgacgttgaacgtgttagtacgatcttgatatgcggtctggttcgcagtgtttcgacggttaagtcgaaccatgatgttgccagtgccgctaacgccacgcgcccggatgaccacacgaatgcggcgagtgttggcttccagggcctgccacttggcattgttcgcacggatacccggattcgcagcagtggacttgttcagttccacacccggtcggccatcaccgtaagtcgcatcccacttgacaccggcattgttctgcccgttcattacccacggagcaagcccaccgtcgaaccctgggttgacgatcaggttgtcgcccatcgacaggaaaccattcatgctggtttcaagggtggtgatctgctgtgcctgcgcgtcaaccttgttaccaacacgctcgacttcggtcgtaaggctgcttaccgcattcgctgcggcagtagcgtcctgttgtgccttctctgcgtcggtaatgtcctcgtaggtcaagtcgtcaacatcgatcaagatgccgttttcgcgaccagatgccgggacacccaggaacatgcgccaccggtcagcagcaccgctcgtttccatgacgttctggacacgaacccactgacccttcgatgccacaagcgtcgaaaggttgatgtttgctcgcggccaattggacgatgtgccgttagcatcttggctatgccagccacaaccgaatgtggttgtggtcggatcagcactatccgaacgcagtcgaatgtaataggtcactcgaatgcgacgacgcgcctgtactggaatgtactccccaatgtaaaggtctgcgttcgaagaattgccttgggcaatgctgataccaagaccaatctttcctgttcgacgcgaagctgcccgataggtaaaggtcgtgccaccagcctgtgcgccggtagcttgctcgccatcagtaccctgttcgaacgaacccatcgggaacaggttgttgccaccattgatgacaactccgacctgcgagttaagctttactatgttctgcgcgttggcattggtcgtgtcgccaatggtcttgacgctagcctgcaaggaactgatcgcaccggcgttggcatcaatccgaccttcctgggtgatatcgaaggcttcgaatcggtcaattgcgattgccgtaccaatagcgttgtccgcgcccaggtgcaattcgcccatgatttcattgcgatcatcgccaataggatgcacgacggtgaaacgctgccaatccggggttacggtaacgaactggtcgttattactttcaccggcaccgctacgaacgcgaagacggataagcagtcgagaattcccaccagtcaagctacgagcaatcacggtctgctgaatgcgacgacccagcgggccaacttcaatgctggtccatgtacgcaggttggatgcgacggcagcactcacggtgccagtaatgcgttccattttcagggcggaaccctgctgaccaccaccggatacccaggtcacattcgaaccagtgatagcagcccacgggtcgatcccgtacataaatgtcgggttctgccacatgttgctgccagaaccaatgagggcgatgttcgacttggcagtcagcgaagtgacggattccgccatcgactcgaccttaccttccgtctcggcgacacgtgtggtcagggactgcacagcttccgctgctgcgctggtagcagccgacaggcgagcgttgtcgccttgctgcatcggaacaccgccaagcaggctgaagggcatgttgacgtacacaccgtcgcgggagccggacgtaccaccggactgagtgttcggcgaaacctgatacaggccattgccgccgctcagaagtttgcgaccaatcagcgcgaacatattcgggccgagtgcagaaacgtcctgagcagccatgccagcatcgatcaagttggctcgcatcttgatcacattggcatctgtggacgtaccgatgttgccaaacgcatccgaagtgtagatcaggaaccacgtattcggagtcatcgcgtcataccacgcgttgaatcgaatggcgttgtttaccaagtcaccataggtgtcgaacacctgggtatcggcaaaggtgttatcggtcttgatcgtagcgactcggatgccgcgagaagcgccaaggcccggatatgcgctgccattcgcacggtacacgccggacgaacgaggggcaccggacggcgacgagctaatcgaggaactcgcaatcacgctgtaattaacagcgtcgccgatgttgctattcagcttagtcaccgactgagctgtggattctgcctttccttctacattggtaacacgaagggtcagcgcttcgagggccgcagcgctggccttgtcgcccacgatggccgtcagggaatcgatgcgctggcccagggcttcgtcagcactcaccatagcctgctgaagctgcgtcaccgacgcctcgctggctaccttgccgttaccggctggcatgcgtgctgtgagagcctggatggcctgtgcgttgaccctatcgccgtcgatacgtgcgttcttctccgacgcgatgaggccctgctgtacgccagcaacatcgctgccttcatagtcgccgcgcatctgcacaccgagcgtctcacgcttcagtgcctcggtagtatcagctgcgattcgagcctgggcctcttcctgcaccatagccacagaggcgccgggagtcgggcgaccgatagcaatccagtcgaactcgatgctgttggtatcagtctgctgcccggtgaaggtaaagcggatggcacggatcggcgaaccgctgttccagggaaggtcagcgtgttcgatgttgccgatgccgttggagttccatgtcggctcagtgatagtgaccgactttgcgtcattccagttctgatccgcctcagtgatccagcggacaaggccgagccactgcggattacccttgcggcgaacgcgagtcttgatgaagcgataggcagcaccatcgaccgagataaccggcgactggataccagtgttctgaccagaagtgttgttcgccggacgcagccagccgtcaacaatcgtcggggttccgtacacgccggaccatccctcgacagtcttgtcgaagtaccacatgctgttcggggcctgatcgaactgttcgccgctaccagcactgatgctggaaatcatgcgggtcagattctcaacgtcagtctcacgggcttccttctcttccgtgatcttggtcgtcaggttgacttcggtattcaagtcacccgcaacacggtccaggatttcctgcgcaaggccgttggtattctgtgcgatctgaccagcctgctggctgatggcgttcgcgttctcagtgatacgctgacccagggcatcgtttacagccttcaggtcttcagcggccttctttgcggtttcaatgtcaccgtcgattcggtcgttgatttccttttcaagatcggtctttacgttctcaacaccggaaatcgcattatcgacgttctcgccgatatcagcgcgaagcgtcttgctgaagtagcgcataccgcccgacagttcgccggaagtgttgcgcgaacggcaagcgaaggtccacaggccagcaggcggcaggactgcctcaacggcgctggtgaagaagccgtcttcatcgcccagcggaatcatgctgtcccacaccggaacgccagtggtggcgccagcgatgtatcgaatctcaacgccatcgaagtccggggacatggtggtcgtctggaagccccaggtatagcgacggatgccgccaaccttgtcctctacatcgaacaggtcaaccagcgccggaccgccgcccatcgtctgcggcaggtattcgatgcgagcgggcttgcccggtacaccgccaatgctgttcggcacgacaacaaacgtataggtctgcaagtagtcgaggcggaacgtgtggctacgggttgtcaggttcgaccctacctgcgtaaggatgccgtccgggccagccatgtatacgttgcagtcacgcacattgccaaccacttcccatgtcagctgacattcggtgaagcgggtgttgccctggatcacctgatagtcgttcgccaacaggttctgaacctgcggatcggtcagcgacgaagcattgtccgggcgctgatactggccgcgatagacgtagttccagaattccggaccttcccatacgacagcgaccttagccagctgatcgaagtccggatcgatgctgaccacacgaaccgggtagcccggagtcgccttgaagtcgtacatccagatgaagttcggtgcctgatccgcagtcgggaacggcatgtcgctcggccacacgtcgccggtagcgcccggaccctggcgcaggatcagcgtgttcgaagtgccggagaacggctcaacgtggaagatgcggcacacacgctcgcccagcgcacgaacacccaggaacggggtcgggaactccggcaccggctcatccagcacgatctgcacgcgaccgccgctgatgcgcgtagcggacaccacgcggccaccgaagccccactgcgtcaggtcatgctgaagcatcagcttgtccatgcgcttgtagctcagtgcctcggcagcagtgccgtaactgatatccttgtactggaacagggactggcccaggaagtagcgcgccagagtagcggcgtgttccggatcggtaacaccctcgccggtcagcgtagccggattgatcgggtcgatggtcgaggtcggcgacttgacgcgaacggtttcggtcttgtcggtggtcttgttgtagtaggtgtattcgataccgtcagcagcattcgccagcgtgtacgacacttcgaacgaagcatcggtcatcgtcgccatgttgacgacaccggtaaacggctggtcttctgctgcccaggtagcggcccactttccgccagctgtggtcatctgtcccatagccacattggcaatggactggatgacgttctcatggctgcgcttgtcggtgatccagtggcggtactcgaacttgtgttcggcacaatgcagcatgaaagccttcaggctctcaatgtcgatttcttcatcgggcaggcccatgcccgccagcagttcgccgtcgtcggagtagatgccgcgcaggtactgaagaatctgtgcgcctgggttcgaggtcgtcttcgtctcccaggtcgtgccgttccacaccggagtcggctttgccgttgcgtgagtggtcaactcattcggtgcaccgttcagctgccccgacgccttcatgttgatgccgatacgcgggatgaagctgtaatcagtcgggtccggtcgggccgtgatgatcgaagtcagctggaaggactgctggtcactgttgccggtgctgttgcgacccagggcctgcacttcaatatcgtacatgccttccggaacttcgaagcgatattcggtgcggtgttccttcttatcgatattacgaatcgaatagtcgcgctgggtccagtcgttcgtaccggtcggacggtaacggatgcggatggtttcctggttgtacgaatccttgccctttcgggtaacaccgtacagcgtccacgcgacaccaacagagaacatgatggtgttcgcgccagtggttcgattgatgacaggacccggagtgcccttgtcatcagccgacagcttaccacccggaagctcgaaggtattcgtcagcatcggaatatcgaccgacggcataccgctgaaattgttgtggtagaccttcacgtcctgataatcggacagcggcgtggtgccgttcatgaagggtccgacactgtggacgttgaagcccggcgtcaggatcatgtccaggtactgatcgtcaccctggaagtaaccatacgggcgagacagcacgtccggggaaatcttcacgtcttcgccgaacagcaggccgaacggctcatagggccgcattcggttgttcgtaccgttcagcgaattgagccgtgatgtgtcctgggcagcaggtgtctcctgcttcggccccagcaccttctggatcagcattgcgcctaccatgtagacggctgtcgcggccagggtagcggccatcgaacccataccagcggccatcgcggcgccgtacacggagaacgcagccgcagcgccgatgccgaaggtgaagacggtcagcgcgaccattgcgacgatcatcagaaccgacttaccggctacgtcaccgcgcagttcgatcagctgtccgtccttcgggaaggtggtgaaccagtcctggcgctccacaacttcaccgtttacaacggcaacccacttgccttcatcgagacccggcacatggcgattcaggaaggcataaagcgattcccccggacgcaagtccaggggaacattcttctgccctgccagcgcaaccgggttcggggtcaggatgaagcgggattcgttgtgatccatgagtaatagccttcgattctcaatcgggctgatgccaggtctcgaacgcgggtagtgatactcccgactaattcatcctgtgcatgcagaatataaggttcgttcgcgaggaagaagtaaacaccaacatggctaaacttcttattcgggaattcgctcatcaatacaagatcaccatcttgcggagcgtccgtctcggtcacgtatgcgcgtgaaagttcacccagccgcgcttggccgattctaccacgcgggcgccgagacggaagaacgatatcccgcccgaatagctcggcctgcaccttgaccacaaggtccgcgcagtcgaacgtcttcgggcagtatggcaagccgataaacggcgtcacctgggacagtttcatcagtgaatgcccggcgcgtagaacggggacatacggcgcttcactgcctgctgattcgccagatacttgaaaccgcagcgagccgtaatcagctgcatattcgcggtaaggttcgtgatcggcagattgaagcggaaggcttcgacgttcggggtattgcggctggtgatgatgattcgagccttcaggatttcgttcgggccaagggcctcgatatcctgcatcatgtcacgaccaacgttgtcgatttcgagagtggcttcctgcataccactgtcgttgtcggacggctggcggaaacggaacgggtagccgatatactcgttaccctggtgcgtccagttcttgttgtcgttcaccagtcggagaacggtcggatcgacaggtgaacgaacttccagcagcatcaggatgccaccttcgtgatcgtttaccttctgcaagttttcgaggaacgtagccatcagccttccatatattcgatagtgacggttcgcatgaaggagaaccatgcggatgaggtcggaacctttgatccgatatcaccctctttgaatcgggcgtttcgaatgagcgtcttcgtacccggatggacgaaatcgaagaatccgatccggccaattgtggtcatgtaccacgtcatgaactcatcgtgatccgcagcgcgcttgaagtacagcgtgcatttgacctcaataatgacacgggagtttttgatgcgctgcaccggatagctgcggtccatgtcggttcgcagcacactcggaagcagtttttcgtcgtaattgtcggcgagcataatcgccgactcaggaagcgttgccattatcccaccgctggtttaaggccaaaggtattcttcgctgcggtatacaccgggccactgcggttggcgaactggttcgcgacttcaccggcagctgccttcaggaaaatatcgatgttcatattaccgttcgcgtcggtgttggcctgtgcatcagcatcctgctgaccgtcagcaccatatacgttcacagtaacagaaccgttcgtgttgccagcggcctttacgccaaggcgaccggacgaatcacgggccaggggcatgattgcttcagcgcccttttccgccatcgagccattgtggtcgaacacgccgccgttagcaaactggaaagtgcggtatccgttgaccacacggttgctgctgtcggacaggccggtaccaccagcgaacacgttaccgttgaacgatttcttgttcgagcctgcggtgctgatggactggttcactgccatgcccatgccaccaccggggaacagcgagccgataataccagcgatggctttctgtgccgcaattctagcgaggtcggcaatgatgctgcgagcgaagtccgagaacgagaacttgccagtggtcacgaagcgcacgaacgcatcttcggcacccttgaacgcattgctcatcaggtccttcgtctgacgtgcgccatcggtcatgttccgcacgtactcattggtagccgctcgccaaccaacagtccagtcgtcacgcatcgaagccaagtccgcctgatgctgacgttcgttttccaggcgacgaccgtactcttccttgatgcgctcagtctgagcaagacgctcggcctcatccttagccacattggactggcgcagcttgtcgagttcgtcggcgtaccactggtcgatttccagtcgtcggcgcatgcggttcatcgcatcgctgtcggctgtcatcccaatgatttccatgcggttcgcgttgttctgattagctgcctgggcacgcagtgtgttgtccaggcgaatcattcgttccttgacagcagcctctcgttccagggcggccttcttctcgccggacagcttcatcgcttccattgcggagcgaatctcatcctggcgggacttggacagcttgttgcccatttcggcgaggtacgcagtggcttcagcaagcagtcgctcgctctcggtcagctgcttgtccgtttcaaggcgagcctcgttcaggacgttctgcttcttcaggcggtcgagcatcgactgactgccgtcgctcggacccttcggagtcttttccttgttcttggcatcataagcagccatcagcgcattgatgcgcttctgcgcctcgatgcctttaagacctgcctcttcaaccagtttctttaccttggcctcttccatctgtcgagcgacggacttgtccaaagtggcgctgtactcgcgcagagcgtcctggcccttgatgcgggcaatgcgcagttcttcttctgcctgtcggttggcttcaatctgcgcacgattctccgcgtatcgcttacgcagatcatccagtccatcgccttcagtcacaccgaagtagtcagacgcacttcgtccgagcgcacccagctgaccgaaattgcgcttgatcccctctcccatttccgcacgcttggcacggtcaacttcctgggtgtaggcaatcacgtcgccaatcatcgacccccagaactttccgtgcaccgtagccgcattgaccacagtagcggtgaagtcgcctactgaagtcgttgcgtcagacacccacttcttagtgtcctcccacagctgcttgccagggcctcgcgcatcctcgatagccttcgaaaccttgttctgatggtcgaggtagattcgcaacgcttcggtaactgcctgctgacccttaccttcggcttcgagcgcacgcactcgctcccactgagcagccgacaggaaatgttcctgctggttcagctggtccagagcctgtaccggatcgcgtgcgattcgttcgtacttctcaacgatatcatcaagggcggcaccagttgcagcaccgaatcgcgctgctgttacactggcttccttgaacatttcggaactgatgcgaccgctacgtgcgatggcggtcatcgcttcggcgccacgtgcgaacgaagtaccagcgtccttgccgatggccgaagccaagtcgtcaaacgactccttcgtcacaccaacccaattgtttgtctcgcgcagagcaacgttgaaatccttgctcatggagacatagcgatccatcgccaagtaaccagccaccagcgcggcagtcacagcgacaatcgggttagccaggaatcgggccgacatgatcgcgatctgcttcgccagctgaccaaggctgacgttcatcatctgcgcaatgccgtacagctgcgcaccctgctggatgaacacagtcatcgggcgctgaccggatgcgaggccgactgcaatatcctgcaactgatacgatacgttgaccatatgcatgcggttggcttccgcagcaccggacagcttctgctgttccttcgtgaagttggctgtctcacgcgaagcattctgactcgcggtgttgacctgggctgtggccttcgctgcacgctcctgtgcgttcgcccggcgctcgatggcctgggacagcttgtcctcaacctgggcctgctgcgcggccagcgtggcggctttctgagcctccgtggcggctttcgcctgcaacagctgggtccgagccgtctcagtcgcgaccttctgtcgagcaagcaacagcttctgttcggattgcagcgcacgcgcctgcgctccactaagggtcgaagcactggccgctgcatcgcgctgcgacttagcgaggttcgccgacgctgtggcaaggccggactttgccttttggaactcgcctcgcgaaacaaggcgcagggcgtcctgcaagccctttgtggacttcgcggcttggtcagcagcaatgccaagctgctgcatgttcttggtagcggtcgtggtaccctgatcgcgtacctgaatgtcaataatatcggccacgattaccgctccgtaaatagcttggcgtttttaactcggaaccgcatgaccacaagggcagcgggacgcatcgccccaggcggagcttgcagggacttaccgcgatccagatcatcgatgtaatctaggttgttggtaaggtggatcgtttgtcctgccttggcagattgaagcggtcgtttggcggcttccaacatcgccatccgattcgcttcttccgtactacgatcagagcctgggacgtatgcttcacgaaccccggatacagcctgaccaatgcccactcgccaattggaaactgcttgtccggtgtctacgggcgtggaccgagccagggcaaacagcccggctgtcgcgacctcgatcttcaccttattcacacgctcgggcaatgagttcgcccggtcgtgcatcagtttcgcgaattggctaaggttcatttgtcaccaatcgtttctgcgtccaatctcatcacgacattgataagtagggtcatgtcatccccttcaataccgtgatccctgcaatactgtgatattgctgtgtacgggattggaccaagccctccgaaccctactgccctgcacgtccctagcaggttgtacgcctccaaatagaagacggacgccaagttgagtttgggagggttggcaaggtgcggatcgagttccttcttcagcaccttagccagattcacaagtccttcaagttcctttccatactttcgctggaactttacgaactcgatcagtttcccgcgattgcgtcttccttggccttctggaacacagcgcggttcttggcgacatagcggatcatgtcgaagaagtccggcagcgccaccagcagttcggtgatgacttccggggtggcctgcaactgctggccgtcttcgccgacgaaaccttcgccgcgaatgtccagaacgatatgcttggcgtaggccggagccaggagttcagcgaactcttcaggcggcatgttttccaggcggtccatgtgttccgcagcaatcgccgattccgcacgcagatagccgtggtttcggccaccggcgcgagcaatcagcacttcgatgttcgcctcctggaagggaatccagacgccatgcgtttccgcattggcgtcggtcttgaaggcgctgaagagggactttgtggtcatgtgcaggttctccgtattacttcttggtcggggtgggcaggaatgcgaagtagcaatactgcaaggtgtagttcagttcgttgcgaaccgcttccatgtcaatggaaatcgtcacgggagtgttcggctcgatggccgtggcgccattggacaggcccatcttcggcatatcgaacagcacagcggtgttgcggcccatcagtgcaaccgtaccgccaacgtccgcattcgaacgcatggcacgcacagcgcgcaagtcgaggaagtaggcagtgactgagccgccaacgtcgaaggtaccgacgttgatatccaggttgccttcaacaccgatggcctttacgccagtcatgttgttgttgattgtcaccgtcgcctgggtggcgtaggtgaacagcggttcggcttcgccttcgacatgcagccacacgcggttgctggtgttcgagccattgaacatcgggtaggtgatcagcggcttgcgctcgcctgccttgacgccttcctggccggtgcgggtctcttcatcgcaggcaacgaatccgaactgagcagtcaccttgtcggcgctcggtacggtaagggtgaactcgttcgccatcgcgccagtgatgtaacgagcctgcgtaccatccttgtcggcgcccagggtctgttccagctggaacgaatggaaacgcatgtcttcgaacttgtccgggttgcggatcgaggtcgagacgtacagttcgcaggtcgagtcggcttcgcttgccagtgcatcgactgcgcccaggatgcgattgaaggtgatggtgttgccgctggccgatgccacacgtgcgaaaccctggaatgccttcagtccatggatgtatacccaatcgccagcctggatgattccggtcaggttggtgccgtagccggtggtatcagtcagcgagtagatgccattggcaacactcatggtggcttcgcccttggccgaacgatggccgacgaccttgatgtgcagagcgcgattggtaccggcattcggaactccgacctgaccagcctcgatcttgaaggtgatggtcttggcagcggaatccacatcggtgacttcgcggacaccatcggcgcccggaacgcccgaatccaggacgatcagcagatcacccggcgagacctgacccacagtggataccgtgaccacattgtccgtgaagtcggtgatctgcggggtggcgccatcgttgcgaagctcgaataccttgcggctgtcggccagcaggaagccttccatgaagtcctggtggttgtggctagtcaggtcagtggtgtagccaccggccgcttccaggtcggtgatttcgcccttgatacgctgacggccagaaccgattggggtgcgggtggcggtggtgatcgtggcgccgaacgagtcaatgctgttcggttccagaggattccagaccggattgtccggcagttcgttcaggcacttctcgcgggcatacgagaggccggtgatatccgaactgatggttttctgcgggcagttgtttgccatggtattacctcgcggattcgtacatgaagtcggtgatgaagttggcctgcgcgaatgtactgtcgctgctgacttccataatgcgctggttggaatacccgacgcagttttcggtgttgatcttggtaaacgcagagagcagcttgtcggcaagcgcatatgcgtcaacaaaaccccggcccgatggcacacgcacttgggccatcaggaaacccaccgcctcatagcggcgaactccatgggcgccagtcagtgacgtggtgccgccgtccatgtgccggattgtaaccttcagccagggttcatttccagccggaatgctctcctgaaggtcatcgaacaccaccttgtagccggtcggtccccatgcctccatcaacagccccagcatttcgtctttggcttcctgagcgttcaatgcttaactccaatgcctatgattacgcgaacgtcggaaggcttcaacacttccttccattcgatgcccttgatgacaccgccgtcgcgaatcttggtgatttcgttggtatcgaggtcgagcggtggggcgcacaggcagacctgcacgtcgctgctaaacatgttcccggtttcaacagtttcaccaaagcccgaaccttgatacggtacgaatacggcgtccactgtggtcaggacgacttcttggtttgtacttccgttccacggcttcgtaggatcgatagggacagactttattcccatcagatcgaccttcctgccatgctttttgatgagccgcttcgcaagctcatacttcttcatgtggttggcattcatgcgcggatcactcgcccctgggagttgcagcgaaacggacccatcagagtgtcggccttcgggaaaggtgcgaactgcatataggtgccaacaccggtaacgttgttgacgccatacttaacacgttcctcgataggcccgactttctcagtacgctcggccacagcaaggccagacggatcgacggtaggccgtagccacagttcatcctcactcgcggccagggcatattccattgcggcgcgcttcactgcttccggaatgccatcccaggcatcacgcgggaaagcaagggcctggaactcgttcagaacttcgcccttcaagcaggaccaacgaacgccgatataatcggtgccgttgaccagtgctgactctttgtcttcggtcggaaggttggcccaggatatgatgccgcgcagcttgaaatacgcgtccgcttcagccacgctaacgtagctgttgctgtccatcatccccgttccgtcttcaacgatcaggctcattcgaagttacctctgtgtcttcttttggtggctgaggttccggctccggttcaggctcgatcttctcgattcggcttttccgattccaataaagggccgcctgaaggcgaccctttacagtctctcggctacgccacccagcggtgcgcttcaccatgaggtcccccttatgcttgcgccttaaggactggcacagcgcgcttcattgccatacgcgccgcatctaccggagccggaccaatggcctgctggatgatgctcatgttcaggccggtcgagcgcacagcttccagggcttcggcacgttccatgcggatttggtgctggcggcgctggtagatggcattcaggtcctcgccgtcctcgcggttcgcttccagacgcgccagttcggcggcagcttcattacctgcacgcttggccttttcggcagcagcagcagcgtcggccacttcacggcgcagggcttccagacgctcctggcggtcttcctgcggcaggtcggcgtccttgtggtcgtgggcagtcggcggcgccggaatgtccttggacggctcctgggccggtccctggccgtctgcggcagcggcgacagcatcagcaccgaaggtggcggcagtggcacggctgaagcccggcgcttccttgtcgaggtagtcgcgggtgacttcgaagccgagtgctttggacagcacgtcgaggcgcggcagtccgtcttcggtccacagcgcgtcgatttcgggcttcagcttcagcagggtttcatgcagttgtgcgttcatggtgttttcctttgcaggtagattgttaggccgctgttacagtcggcccgtcaacgttgtatacggtcgagccgacttcgttctggccctgtacccgaagggtaatcttctttccgatctgttcctccacaggtgtcatgctcgggccacttacgtaggtcgtaccatcaaccaaccaatcatagccttcattgattggcggatcgccttcccatgtgccagcggtgacagtcagcgcttcgccaaccttgccagtgccgacaatcttggcctgcgtgaccacagtgggcttctgcggagccttggtgccttccacaatctcgaatgtggcgcctccgtgcagggagttgatgacaccagtcactcctacgccgagacgactaccctgttcgacaagccatcgtccaagataacccatctgacgcatgcggaaattaccctggtcgtctttggcccggtatgtgaatttgcgtactcgttctttcgccattgtgttctccggaattaaaaagggggcctagcgcactaggctctagacccccataggctgcctgcactcagccttacgcgattagaactcgcgggtcacgtagcggaccatcttgatctgcttgcgttccgggaacacacgctgccaggagttcgcctgcttgatcacggcgttcttcgggccacccttctcggccagcgagccgacgtaggcataacctgccggagccatgcaccattcgacacggttgtacaggatttcctgaccgccaccgtgaccggcgctttcgtcgcgttccacagccaccggcaccggagcactgcccgaaccgaagcggaaggcacctgcgccgaaaatccaggtgtcgaaaatgccggtggacttgtcgtgcggcatcgagtcgtcctcgatcaccagcttgccctggaaggtcgggatcagcacttcgccgcgtgcgtccgggatgaagtcgatcaggttgttcttcttcatgcgggtcagcacgacgctgtggaccatcatgacgcccagcttcttctgcgcatcgcccatggtttgcagggcgtccaggtagccttcggtcgtgaagttggtcacaccattcacgaagcttggacccgacacgtcgagggtcatttcgttctggatgtggttggcgtcggtcggcagtgcgtcgttggcgaacacgccctgcgcggtggcgatgaacagcgcctgctggcggcgggtccagtagtaggccacgcgggaagcgatggactgcatcgggtccgagccggccagggtgccggacaggtccatggtggaccagctgaagttgcgggacaggcgcacctggacttcattcagcgagccggtcttgctcggggtggacttgtcagccgggtcgtcgttcgaggtattttcttcctcgttcgccagatcgcgccacgacggctcattgaaggtcagaccaccaccggacagcttttccgacagcactgcatcgttgctgacggcgccggagcggatcagttccgagagttcggtggtcaggttctggacgtaggggccgaagatttccggcaccactacgtcagaaatgcgggttgttgccatgtgatttctccatgatgggagttgaaagtgtcgcgcctaaccacatggtgtgcgcgttggaacagggctggctcatgccatgcgcggaacagtaacctgaaccagccctgaagtaaagcccggttacttcaccggggcagtagcgccgatcttgacgcccgccagctgggccagctggttggccttctccgggttgtcacgaaccagcgcagcctgcgcagtcaggttccagcccaccttggtgaacgggttgctgccaccgcctgcgccaccacccgaaccaccggcaccgccgccgctcgatgcttcccaccagtgggaacgcttctgctgaaggtcggacagccatgcttcggcgcccaggccgtccttggtgacgacctgaccatcttcggtcagttcgaagtggttcatgcccagcagaagggcatcttcgattgcttccttgcggaagcccttggtgttcagtgctgcgtcacggatcgcgccgtggatggtgcgggtgcgttccttggtcgtgaaatcggcgacctgggcttcgcgttcggccagggcagttcgtgccgcagccagatcacgttccagcggagcagtgacctgcttcagcttggcctgcaccagctgatcgacgttcttgccaccagcttccagtgcgtccagttcgtccttgcggtcgatcagggcgacgatatcggtcagttccataccggttgccagcagcggggcaaactgctgcttggtcttgcggtgttcgccgcgctcggcgttgagtgcctgcgtcagcttgtcgatatcggcctgggacttcattccctcgattccggtcagcaggaacgtaccgtccgactgttcggtgtaaagggaatggtagtgggcctcgataccgtcgaggttgggaactttgatcttcagcatggtggaatcactccggttgtgttcaggctacattgcctgttggggccttaccatcattggcaggctccggtggtttggcgctttgggcggctttcgccttacgcgccatcatcttctcgatcagtgggccgaactttgagtcctcttcttcaagccgcttcatttcggcttcgaagctgagggaagtcaggccgcgatcctgaaggatttcgtgaacgctttccagggacaggggcaagccgccatcctggatagccgacatgatatcagcgaaattgcgaccgtccagactgaaatcgatgaactcggtgttcgggaggacagaaacctcgtccgggttcagacccatccatgtggcaatgcgacgaaggatgttttcaagaccctcggcagcagccgtagccagctgattcagcgtagcggtttgcgcgttgtagcgagtagccatcgccttgccggactcggcctgggacttgctgttctgcaccagttcgccggacttaacttccgcacggcggcggtcgttttcgagggcgttgcgctgttccgacaaaccagcattggttacaccgatgtacttggcgtcgccggtaatgtcaacgtcaatacgcgagccagcacctgtacggatagcatcatcgtcatcatccttgccccgaacgccacccttgaccacaagggtctgctgggactggtagtacaggttctgtcggtagtcggcctcgcccaggtaaatgccgatgcagatatccagcaacgaacgcagcggcggatcatcaatgtccgacagtgtgtcctggccgttgatgaactcgaacggcacgaagtcgagcgcctgacccatgaatacaggagccgatccggcagaggcattgaattcctggttgttttcgaacacggcctggacatacttgccgctgtcatccagccagcaaacgcggtactgcggatacagttcccagccgaagttgtcgaagttgaaacgctgtgcgctctcatccagaaccaccattcgcaggctgctgtcaacgaccttaccttcgcgaacattccagttggtgatcgattctgcacggtacagtgcgatatacgggtctccgccagtcggagcgatatcggccagcagacccaggcgaccggtaatcagctgttcggtattgatgcggcggtacagtgcctgcaacgactcgccctgcgggctagcactctcgcgcaggtattccatacgctccggcagtcggatcgtggctggcttctgatgcagcagacctaccagcgaacgaacaccctcggtgatgtagtccggcactcgggcgcgcagcttgtaggcttggtaagccttgtagccgcgttcgcccttcttcataccgtccagttccataccttcggtaggcggcagataacggacaccggagtccttcaccttgtccgacccttcgttgaagtcacgaagactctgccacacgtcctggtacttcagatattgggggtgcttgttggtcagcatggtttacattccgctagtcgtgccgccacgggcacccgtcttggttgaaaggaccatataccgaacttcgtcggccaaatggtcttcggcgtcagtgtcaacgtcatcgagattcttttcgtctctcggcaacgcccccatctgttccttgtagtatttgcagctgttgaatgcgaagatacccggctccgttcgaggaatcggtacttcgatatcggtacccggcaacttaccccacttcaccttgctattttccattcgtgttcgaatggcaagccagccttgtacgcgagaacctggggacttatcacttcggcgccattcaacgccgttgtaggttcgacctccaacacgtaccggcttggcaaggtctgctgcaatcgagttaccattgatcatgtcccaaatgctgttgtcagccgggccaggaacaactcggtgttggatattcatcgcaagctcgcgctcgacaattccctctgcgatcttggtggcgagaatttgcaatccggtgttggtcttgccattcgtgccgtaccactcaccgatccggaacagatcacccttgaccgtcgagcgtagcttaccatccggaagcagaacgtcacagccgtcgctgatggcccaccagccgacgctgaatggcctggatgagccgtagtcgaacgagcgcgtgatgcgccagtgaggcggaatggagaagggtgggatgatgtgaaccttttcgtcccacacgccatcgaacataccgccagaaacaatgtcccaagaaccaaacagccacgcagcgcgcaggttcgggtcggtgatcgtttccagttccgccacgtattccggcgtaaggtacttgttctcgcggtaactgctgaacaggtagacctgtagcttcgttacctcttcctcgcgctgtgtctgcgggttgaacacttcaaccgtacgacgaagcagctgtccaggcttaacaggatcgatgaagcgcttcttcactgcgctgtggccgacaccatgtgggttcgtcgtagccacaacttcgaggggaatcttgggcagcagttcttcgcgggcatgccggtgattggcctccacgtagaccttgcggccctctgtgtccatgatgcgcccgttgatgtaaaccgggtaatcttctggacggaatgagcatcgattacagctcatcatcttgtcgaacaaatcgaggttcggccatcgggtaagttcgttgtaaccgatgaacgggaactcctgaccgtggtattcccaatatgcttcttcggtcttaccaacacggaacagcagttcttcgccagtgggccacacccacttatagtcggccttacccgacatgaacttagcgccgtcattgaacttggggaacagtcgcaagctcttgctcacgatatcgtccaggttcttgtaggcacggtccatgatcacgccacgccagaaacgaccatatccctggccgactcgcgcccggaagcgcatcagctgggattcggtctttccaccacctcgcgacccacccagcagcatgatatgtgccgggcaggacatgaagagggtctgtgagcctggaagtggtttccagactacctttacatcaggttcgtgacgcattgtcggtgtgcaactctttttggttgctcatcgcagacgattcccatgcgtccacgtcggttgcagtagccggggcaaacatcacgccgcccttatgcgtatgctcgacagtgttcttttccatgcctgcgatcttgcccagggcaacgagcgcggcaacacgggccgactgagacgagccttcgccgtagttgtttgcttcgcgcatgaggccagccttcacgcggcgacgcataatctcggcttcgtcttcttcgtccttctcggcttcttcaacgtcacgaatacggttcgcgacatacgggtatgtcatgaactgcttcgcgaacgccagggcatgatcacccccataacccaggcgtcggcacgcttcaactgcatcgtagtcgcgcagatattgctcgacaaaacggtccagcataatgcgttgcgattcattcggagcaggaaccatgccctgatcgaagaaaacaccctggtaagaatcactcttatccatttctaggttacgtccggaaggaaactgccggtaagttaaacggcagctgactgattagtcaactgcaatcgtgccgtaccgttcctccaactgcttccatgccgactggaagaatgccagcctttccttgtcctgcaagcacgacgagtagttctcggcgatggtcagggcagcggtttcaacggggacgggggctgcatcatgtccgctggcattgtcggcaatggcgcgaccttgcgcggcggcgtcgtggagcaggcggaaacccccaggcagagcaggagtgtcagcagggatgtaaatcggaacttgcttttcgatgacatgggcttcacccttgatgtactggatacggtcacgatacttcacgacctcaacttcaacaatcttctgcgcctgttccggcacgtccttggctgcgttctccatagccacaatggtggcttggcgggcggcggcgaggtcctgggcttcctggcggcgggcgtccgacacccacagggcaacggacagagccaggatcacccacacgtacaacggcaggccaatgagccagctgccgaagcgcttcaggtacagcaacgcgaaagcgcccattacaggcgctcccgcttgacccacttacgccatggcgcatagtggccgatcatgaaaaacacaccagcaatcccatacagcagtgtgacgccggaccatttgatatcatgggtacccgacagcagagaaagcgtcaggaaggtagacccaattcccatgagcatgaaacacgccccgagaatgatatcgaaggtcttgccgtacccccgtaggctttgcgtgatcggtcgtacgtcagcaagaccgaaaagggcagtgatgaggatcaccgccagcgaggggagggatgcgagggagagaattgtcattgcgcgttctcctttcggttcgtaaaccgttgcgccagtaccgagaacatggcaggaccccatgtctgcgaggaaaagcccagtaacatcgccatagcagcctggacgttggtattgggccacttatacccgaagaaatcggggataatcacgataaagccaactgtggtcatggctgacacaacaaaggctttcaacagtcgaatacgggactggtagttcttgttccacacaccgatgaagcaaccggcgaacgcaaacacgatgacgtggaccggctggcccaggaagaaatcgttgaacgacggacttatcgccatgatcgctgtagccaaggtgataaacttggcttcaaacatgctgttcattgttcaagccccggcagatatttggtcttgcctccgatcttgcgagcatgaagaacctgacgacgattgcgagggccgaacgatacatgcgtccagctgccgaactcctcgatcagctgatcgaatgggagacccaggcggatgattgcctcgcacacttcctgcgaggtcatgcctttgacgcgaatgtcggctgcttggcccaggcgatgctgcgaggtcttggagccaccaacggcttcattgaccttctcggagcggaatgcgctgttgatgatgatcggcagaccaatactgtcccgcaggggttgcaggatgtggattgccagttgacgcagattcgccagttccgtggcattcgggacgttaggttcgttccgattcgttaccgtcaattccttgacgctgaagttggctgtaatttgctcggacacaaaaagaccccggctgatgaatgcacacacggtaagcgtacgttcagccggggtcaagcgtgaaatcagtcaacccgcttcggggcgccacttgtcagtgcgaatgtagaatcgcacagtcgcctcgaagtgcttcatgaagtcttcctggctaatctcggctcgcgcctggacgtagccatcggaaccccacaccggcacgaacgtatacatcacgacatgccagttgcgtttgccgttctgacggtatatgaccacaggattaccgccgaactccttcgcagcgacgcaggactggttccaccacgtattgatggatagggtttcctgccgcttcacttcgatggcgtaaccgaagggattggtcaagtcgctaccaccaacagccgactggttctgattgcgctggatgagcggtttcaccgggaccggcacgccttcttcgcggcatacccgttcgacaatctcgttcatccacgtggcgacttcgcgttcgccatttgcgcccttctggcggatgttgattcgcttcactaggcaccccgatccttcagcaccttgacgatgtagtccaggtcatcctggaaccatgcgcccgcaactgcggtcatcgcccccttatgaaggacaacatcgaagctggccgaggtaagtccgttttcgaaagtagcgcagtttgcacttacgctcccatttccgtgtcggcgctccataaccttgtagtcacgcccgcttgggcataccacagtgaagatatcgagcaatgccacaggggcataaggggtcttgctcccatcttccttgcgcatagcctgggcgcgcaacaggctgtcaatcgcctcctgcaagtccttgtcggcatccttaccggcaccacgaccgcccatgacaagcagcttcttcacagcatgctgcacgcagggatcagtgaccttgaacaggtcaaggacgcggtacacgtcgatggaatcgaggtgccgcacatccttgtggtagtgggagtgggcgctcatgcgccctcctccaccggctcacccggttcttcggtcggaacgtcgctgttccagtccatgtagaagtcatgtcggaaatactggccggtgctgacgatgtaggcttcgtagccgtcgccgcacttggcattcagcatggaagcgaccttcacggcggtgacagcgttggccttcatcgccatggcacccagggcatactgcgcacctgagccgaaggcatgcttgttctgctggtccagctggtacacgtccggataggcgctgccttcgtagcattccatcacgtgcatgccgttgtcgtcggtcgtcatgaccacagcgaggaagtcatcctgggcggtagtcgggaacgccttgcgaccgctcgggatcagttccaggttgtccttcatccagtcgatcacttcgctgacgaagcggctcgaaccacacgtcgcgacgaagtagttcttctctccgatgaccaacttggtcagcttgctctccttcacgatgttgccgttgctgttggtggctcgcatgtcagctgcgatcatgtggccgtcgtatacgataacgctcatgtgtcactccttggttgggatcgtcagtatgccatagtaggcaaagaaaaacccagccgaagccgggttcttcaggtgacgtttaattaacgccgaattcggaaaacgtcatcgtagcccttcagcttcagcacatcgatttcgtccagatggtccagggcacgattgctgtacggaagaagggcttcaccggcaaggctcaggaggacgtacagcaggaacagggtgttgtagaccggcacgaagacgtggaccagcaccgtcaccagcaggcccaggctcaggcggcgttcttccttgatgttgccgtaggcgatgaagcccatacacacggccatgatggcggcagtcagcaggtagacgccgatgaaagcgtagcctatttcggggctgatgaatgcagcgaagatgctgcggaacaggtcaaacatggtgtttctccgggttgtggttggtggatgctacagggtcaggcggtgcgggtccagcggtctccgcgccggtcgcagtatacgtcgccaaccaacaggtttttgatcgcctgatggtcgaaccggctcgaatgagcatggatggaaatctcgtcttccgtcacccggaaaggcggtcggtagtagtatcgcccaattggtttcatgctgttcggattgctgaccgaaccttcccacttctgtgcgcgtacttcgagatagaacgtcttcatatcagtacctcttacgtggacccatttgggcgatgagtttagccatttcttcgcgttcgcgttgatggcggttgagactgcaaatttgtttgcccttgtttggtggggcaagtatcgaatcgatggtcgtacatccagccttcagtctcgacaggatcgtggagcggtgtatcgtcaccccacggtccttcgccatagccacaaaggagttgacggagtagtgacggccttcgatcaggtatcggccagccgtctcatgcttgtgtacgtcgatctttcggaagttggtcattgtgctgcggtttcgtagataacgccactgatactaccgtcgtcattcttaatgtagtatgactgtttcagctgttcggcaacatgcggagcgtgcttggcgacgatccccatttccatcatcttctgcctctccgcctcttccatcgcgatcaattcgcgggcttcgtcaggagtcaggcaggtgcagtgactgcacgattgtgcaacgatcagcatgtcgttacagtcagggcagaagtgccaaccctgctgtacttcgtacgcagccagggtatcgatgccattcatcagctgttcgtaccgtgcgatgtgcatgcgtggcttggccccaggctcgcaatgctggtagccgccgcacggtactgtggtaatgggagggggcggggtgaacatgaggcaggctccaataggaaagcccgcagcatagcgccacgggcttcggtaggctagtcggtaggccggtgggccgcgtcgtagatgacggtgcagagccagatgaccaccagggcgaccccgcagatcacgtagcagacgacgtagcagacgacggccacgacggtgaacaccacccaccacaggagccacgccgccccgcagagcgccttacagaacgaacgccagagccaggtcatcggcgcacccactgcccatccgggtccggtaccatgattccgtccatgtccagggagaagtaggtcggttcttcggcgtcaggagcatcgatcagctgttccagcagccagtcgaaggcaccatccacgctgcaaccggccttaaccaagtccttggcccggttgatcaggtcttcggcatcggataccggtccgaccttgacctttgcatccttgtggacgaggctcatcacaccgtcggttcgagtgaccacatagaagccagcatgatccacggcttcactcaggtagccatgcagcttggcccaatcgacagtcaggaggtttgcgggtttcatggcttcacctgcacgtagatggaattcagagtctcgatacgcttcagcgtaccgtcttcgttgaagtccaccgacttgactcggctggtgcgaagacagtcgccaagaccaattccgtcgcacttgacgatggcgagaggggccttcagttcacgatggatgagggcggcgtcggtgaatcgcttgatgggtttcatggcgtcagtctcacgtcgtcgtagttggatgcagcattcagggcttcttccagggtcatcagctgcttctctaccagcacagcagccagtttgccgagcatgcggctgttcttctgtgccatgcccagggcttcttccatctggccagagaactcataggccatgggactcggcgtcagcacgtcttccaggtcacgtacggcagtgcgaccgtgattcgtaacatacaccttcattatcggttctccaacacgttctcgggcgtcgcggtctgcccaggttgcatttcgctggcccacatgtcgtcatcggacccgcagttgacccacatccggtgcttattgcacagctgggccagttcatacaggaaagcacgctcgcgaatctcagaacgggcctgttccaggggtgcgatctggttcttgatcatcagcatttcgttttgcagccggttaatctcggcctcgaccgctgcgagaggcatcttgggcgtgacgatggtcgtcattggatgttctccgagcagaatgccgaaatgatacagaaagcgatggccgaaatgatactgacaatgatcagcgggacgttttcaacgccgttcttcaccattacggacacaatggccccgtaaaggaacagagagacgcaaacgatgatggtgatcgagagattacggttcatttttcaccccacagccaacggagggccagcttaccggccgaaatctgcgtatagccgaagaatcggctcttatacgcctggaaaaaaggattgcgcttgaatcgaatcgggtaatgtaccaaatcgaagttcagacgcccaattcgaccatcaatgatggtcagtcgtccgtattgatcccgccgaaagaagttgtaaatactcatgtttatgccttcgtgatgtagtttacggtgatccacgggaaggaagtataaggaccgttcctgaatgcagacggaatgaccttgatatgggccttgatcctgtagaacgagccgagcgggccagtgtggtcaaggctgacggtctgtccgcccaccaaaagcagggaatcatcggaaaggcacagcgtatcgcggatgtgcccggctacggattccggatcgaggctaatattcatgatttggtcctcggaatcgggccaacgaagccgtatacgtcgccacggaagcgttgatcgctgcccaggtatgaccatcggccatccatccacatcagaaacacgtctttctggaacgggcgtcccatctgaaggtcgtcaacgcggcatgcgtacacgccaatgtgatcaggatgcggctcatacagtacaccggtctcgtcaatgtaccaattattcatgatttggcctcaatatcggcccaagagaacgtgatttctgtgaatgcgcccatttcatcctcctctgcggggtaggcggtatacttcaccttgaagccacgggcttccagcatggctacgatgtaggctacacggtcggcgtagggatcgtcggaaatgttatcgccatgatccaggtcatgttcgattatcgttgcctgggtaaggtgcgtggactgcatgacataggcttcaactacggcgtcgaaggtcttgttgcgggtctcgattgcatcagcagcggtaaacatggctcactccttagtgaagagttgggtctttggaagggaatgcctcttcaatggcatcggcgaggttgtccccatgctccgtgaccacagagtagaggagttggtccgacagcgggatttcggacattacgaaatagttcccgtcttcgtcctggcagaccttgatggtggcgacaatgttcatggtaggtccttacagggtgaagggagtgacgaccagcagcacccaccaaatcagctggcagatgacgcgaaggaactgttcggtcgggaacagcttgctcagaagacgggtgccgacaatgccgaacagaacaacagcgatcaggtaaacgatggcaaacatgaggtagtaactccgtagtaggtaggtgaagcatacaatgtgaaggatgaacctaaaatgaccgggggagattttggggacctatggctcacccacccctagtaattatatgtaccccaccccatacgccgaaaggccgaccctttcggatcagccttcattcattcagcgttggttgtgtcagcgtatgcgcttgaacgtgtctccgttatgatcgctgatcgtatcgcctacagccatattcataagcttggctatatcagcatccatatcatcggtaaggcatacttcagtgatgagccatgcgggttggtcctgctggtcaatcacacgcccattcagtgccaccagttcccatctacgctccatgcgctccacgaaacggctcatgcctgcacatcatcccaaccatgcgacgcaggcttagtcacttcgggttccggctcccactcggcagcaaacacacccaggtattccaccaatgcaccagtatggcccgatgcactgaccgcgctaccgtcgctaaatcgcgtaccgacatagcggccctttcccatggtggactcgcagtagaaatgctttgcgtctgcatcaaggccggtgcacagcacgtcggtatcggtgtgggtggcctgccccatggaaagcagcacagcagcctgtgcgtaattttcgacgttggtagcgagattggtgttcatgtcttgttcctaattagtggctggtaggcggtagtgccgtcccagtgagtacataatagcactcttttccaccttgtgcgtatccgaacctaagatatttatctactattcaggattctagcttcctcttcccaggtcgcctggactcgcttggctgctgtgtcttcgccaacatggttgaagattccacacttcactacgcgcaaccccttgaaccgtggattgattttcagacgctccacgggcagcgttccggtgtactcgatcagggcgatgcgagtatagccgtgtgcgtgcatgcccgtaggaacggctgtaagtacgcggtagctcatccttcacactcaataaaaacaatctggcacaaaccatagggacgaatcacatagccgtcgccgtggctttcggttttgcatcgaataccggtaagcccaagcttggctttgaccgccttgatcaattcacgctttgcgatacggtcggcacgtgcataggttcctacaccaccgtcatacccataatgagtaagctcgggcatggtgacagttccgcgcttaacccatgagtaattggcttcgccagcaaaggtgtcggtgtgttcatagctgtatttgatgctcattacttggccttcctgtcgattacggcacgaacaaagcggaaattctcattgccgagcgtcgcattgtagtaattcagacagtcccggcaggtgcgccagtgattcgtgctggcgtaatacttgggattccctgcggtgtcgagaatgtagatatcgatcttcgggttggactcgcggtattccggcttagtctgaattgccataagaatctcctgtttcacgtggaacatgttgcggataggtggatgctcactcattgaatgagcatcggcctagctttaacgtgcgtagaagatatggccgtcgaattcgtggacggtatagtcctgtttcagcgcgtcatagtcaatcttgacgctgatccacgacggcaaacctttatggaaatcatacaactcctcgaccatatcatccatacgttcctcgaaatcgtcggtgtggatgatttcgtgcggataccaatcaccgttccactggtgatcgccgcccatacccttcagttcgtcggcgatttcctgcaacgcattcagttcgtgccactcatcctgcattccctcgaaattgcccacgtcctgcaatgcgtactcaaacgacagggtactttcctgttcgtcgtggtgcgcttccagttcatcgcgcagttcgtcaatacggtcggtgatttcttccatgcgaaccgaagtggagaagtcgatggtgtgtttaacggtcatttgcgtgttcctaagtgtttgtgagccgatggggttattatgggggttgattctatgtttgacaacccccgaacctaagatatttaggatttattcagcgtactttcgagctgtcgcgagacatgccatggaagtcggcatcttacccaagcggacagtctcgcggacaaaccaaatacccagcggctcgcacacgtcatatgcgtacacaccgccgtaattctcgctgcactcactccacactttctgcacagccgggtggcacagggcgagcatgcccgtaatgaattcgatctggccgtagcccatacgggaaatgatggttccgttttggcgcccaccctcatcgagtgcctgaatggcgcccatgccaaggtatgcgatatcggctggatcaacccgaagtgccgcagcgccagcggtcaatgcctcacgttcggcggaattggcttcatacacaccgtttgcaatacgttccagaatatcagcgttgttcatcttatatctcgttcatcggaatgcacatatcatgcgggattgcttggcagtcggaccaagtgcggtaagtatcggttacatattcgtctcctgtcaagtggtcgatctgaatcacagcgtacaaattcgtctgtgcgtagccgtatgccataccggccaacatgaccacactagcgccgatagcggtcatgcttcccatactgcggtccccttgggcagacgtgcgacgcgaaggctattgcgggctgcggctcgcgcttcggattcattggcaccgtagaaggtgaatgcgtatgcgtggcccggtacgtggatattgtaacgcttgctcatttcggtgtctccctgttagttagtagtggtcggcttgtatgcgcggcaggcagcacgtgctttggtaaggcttgggccaagatacagcaccttaaacccatcttcagcgcgggcaatgtaacccatgccccgaccttcaatgcgcgttcccttgccgtgagtatcgtccacatatccgcagcggaaaccgtagggagttacgctgccgttcttattcaggatttcataggacatttcggtgtctcctagtcggtggcaggtttgccgttgctcgatgagtgtattaaagcacagtttcagccaaaagggtgaatggatgctgaataaatcttagggccgagattcagcgctatggaaaggaacgggcgcgcacgcgaatagcaccattagtccagcctgtcaacaaaacagttcgtgaatgaatttgcttaacgccagccgaacctaagagatacagcttgcatcattccccggcaacgagtagccggaaatatgaacggttaatcgttgtgaaatcgtgcccggaccgctacgcgagaaagcgtagcttaacacgtagtcgcttaatgaaggctgaatgttacatagtaaccaatgagaaccgttcctaatcgctgtttggtgtctcaaatgttaattcatccgttttcgggattcaggcacagtcggccaggaccccatccgtgtttaacagggtggtatccctatttaacggccaaaaatccagccatgggtatccgtatttaacggttcaaaaattggctcgatgcagtagctactaattttcgaaaagatttgctgaaatttcgttaagagattggattttaagtggttgattttaaagaatttaatatataaagagatataaaagagtattaagagatataaaaccaacaacttttacttagtgagggtaggtgacaaaaaacgtgtcacagtcaatgtaggtgcgcgcacagtaccccccacgtgacgtgctagactttttggtaggttacgcagaatgacccacccgttacgcgttctcagtcacccacccgcaaatcgcacattttcgacctagaatgttaaaaaaggccgttttgtgaccttgcgtcacctacccacacttggcttgacacgtgacacggcgactcgtaacatcacgtcactcaccctcaaccacatgagcctgcacatgagcgacactgacactcccaagaacaagcgcacactcagtcgagttgacgcagaaatcctgaacatcacgaccaaatatagatggaggggtggtagtaattctttcacccgtggagaactggcatacggtcctaatgagattgccttgctgaagctacctcccgacttccagaagaaccgcgaggcggagtctcctgtttggaccgctccgttccttgccaatggttcccgcgtacgtgtggtcatggagcgcgccgaagagttccgcgtgttcccggtggacattaacgaggaacagatcaggtggattgctacggcagtcctggcggacgttgacgcgggcatgagccgtactgaagcgcgccgtcgccacattgcgtgcggattcctggtcccagcgctgtggctcactaagctggttcccgacgatgcgtacgatgcgctgtaccacgacactcagaagaagattgcactgagtggcgtagagaatccggtggctgttgcggccaagctcgacttcgaggaactgttgcgcgggctgtatctggcggtcgatgcgcagttcgggaaggctggtggtgacttgcttctggcgctgcccgcacggtgcgcgaagtacctggaaggcatccgtacgcagaccggcacccgcacggcgcgtagcgggctggctgcggcgtctgaggggcgcgcaggctcgggcaagggcctcaccccggcgcagcgccggaagctcctgggcaagccggtgtggtcgatgctggccgataccgagaccgacgcgaaggcgcgtgcactcgccattgccacagagagcgggccgatggctggcatcaagcccaggacgatgattcgcatgccgagtgacgaggctatccgcgaagtcatcgagaacatgaaggacctgggcgcgcttgggctgaagaacacatcttcgtacatcgtccacaacgggcacgtgcgccatgtcggggtggagactgactcgactacgatcatgcactacatcgcgaagctggccgctatcgtcaacaaccccggtggctgggaagagttccgtgaacgctggatggaagaggccaagctgcgtgaccccgatatttcgtacgcgaagctggctgaagtgatgctgtggcccgatcttcgtgtcgtgaacgaggtcgatatgagcatcgtgcaggaggtgatgggctaattcattaagcatccatacacgtggggctaggcatactggccccacataaccacacgggattccgcaacatgaaagctatgctgaagaaggacgatctggaagtcggcaagccgtaccttatgatccgcaacgcaagtttcgaatccgttcgctacggtatcgaagtgaaggaggttgacggtaccctggtggtacacgtgaagaacctcgaagacgacttcgaaaccgacattctcatgacgaacgtgaacagcgcttgtcgcttcatcgaattcaactgaggtccgatatgtcgaagcacgatagcaacatcaccgtacacgtttgggcgccggacattcgcgccaaggtcgagcaggccaagcagaccctcgaacactacgccgttgagtacagcacggcctacgaagcatgggagactcgcatcttccgcgtccgcaagtggcaggacaagcgccgcaagctcaacttcgactacctgtgggcaaagtgcgaggccagggtgcgtgaccgtctgaaggaagaggccgagatttcgatgcgcgagtggctgtctgcgagtgaggcagctaccagtgcctacgccaatcaaaagcgttcgtggttccagttccgcactccgctggatacttacaaggaagtgtacggcgttgatgatcttggagaaatctacgataggaagctcgctgtcatgaacgacccgatgattctgaagttcaagactttggaagagttcttcaagacggtgaattgcgccttcatttacgcaagcgaactccgcgaacacctgggtatcagcaaggaactcgaccggatgatcgttcgtagcaaatcggattaccgaatccgccgctggtataagccggacctggatactcgccgtgagtgcaacatgccgccgacacgacatgaccacatgcgatactctcgcgacgtgtacaaactgcataaggcagtgaaccaggccggttcacatatgattaatgtgccggccagtattctcgcagctgtaaacacaatcaacggagaagaagcatgaagatcgaacgcaatgtacgcccggtgccgccgagtattttggtcaatgggtgccgtatcggggaaccgtacgcaatctgctacaacgaatccggcgaacacgtacctctcgaaagccaggaaatcgtggtattcatgaactccgatcagggatatcacttcatggtaaacctgagcaataactacgttcgccgggttgatacactcacgacgaaaatccgactgcgcaaggtcgaaatctccatcaagctggaagactgaacaatgaagatcacccgcaactacaagcccgaaagcccggtcatcgaccgccttcgactggaagaggggatgagctacctcatggttcagtccgccgatggcgtcatgtttcgcaaggaaaagcagatgctggtgtggatcgctcgcgacaagcacggcccgatcttcgtcaacctgtcgtccggctacgtgatgccgattgctgaagtcggtgcaagctgccgtttcgtgaaggtcgaaaccgaactcaatgtgaaggaggactgacatggacctcaaattcaaccgccctgacccgaagctgttgatcgttcgcgatcttgtcaaggggaatgtctatcgcagatatgacccaagtgacggtcgatggaatccgagcgagagctactacattgcatgtcgcgtcgggcagagtttggacgtatatctgacaaaccttcgaagcggcgacctgatgttggaagaggtttcgtccacttgccgcttcgaacttactgaggctcatgtggtcatcggggagggcgtgtgatggtcatcgacggcaacgtgagcaagacctaccacctggacctcgaactgaccgaatacgaagcccgcatgctgatggcactgttccagaatgcagcaggcgaaggcgaaccgaaggaagcgagggcgatccgcgaggctgtgttttccaagctgtatgctttgggagcgcgtgtgtaatgaacgcacatcgtcaacgcatctacgactacctgaccggcgacactcacatcaagttgtccaggcgtgagcgagccaagtgccgccgcatgcaggagcgccgaatcaaccgtaagcgtgtgcatttccaacgcatgtacgtcacccgcccgatcttgcgcagtgacggcaagcatgagtacactccggacgcaccagcctactacggtgaacgctaccgacgtccccaggtccgcaaatattgggacattggcgacaccttcgcattgaatgcgtaatgatttcccaacgcccaggagggcatatgcacccgacgaaagatgaccacacctatgaaggcggcggtattaccgacaccatcaaggaagaccgcgaggaagtcgccaagcgcaaggaagcacagaagaaggcagaacgcaggtccgctttcattaccgcaggactgatcctgttggcgataacagcgatttacttcgtcaccaagtaagtagattaagccctggttcacaagccggggcttattctttgtctatcaactgaccacatggagttcgcaacatgaagttgttcgtcacaaccatcagcgtcgtaaataccaattggggctactcgcgtagctactcggacttctcgaagatcgattcggataaggccgactaccactgcctgaacgaagtcaatgcgcaaaaccacgactccgacctggacaacgaattcgttagcgatatcccttacgaattccagcgccagttcattaacttgaattggcattcccccgaagcattcgttgaatgggcgaactcggttccgaacctgcatgcgttcgtcacccgcacggaggttgaggcatgatccgtttcttgcaggttgtccttctggccctgctggtgttcgctgtatatggcacaagcaaatcctacgagcaggccaaggaacgatcccttcgcgcacgtgaagtccagtgcgacaggttgtcaggtaagggcaacgcaggtctgtgcatcatcgaaggccgacttatcaacctcgaccgtagcgactaccgcgaacaggcaaggaaggctcgcaatgaacgctgaacaggcaatggttgtgatcgagcaggcagtcaaggccaagattcgcgactacttgattcggaagtatgtcggcttcgatgcgatctaccgcccgaagtccatggaacacatgccggtccgaatggccgtgtgcctcaacgatatcgtggtcatgggtaagaccatgagcatcgggacgaccggccctaagttgcacaaggttatgatgcggcttgttgagcgaggggacattgattcgcgcgatcttcgctactttgttccactgccgttaatctgcgaatggttcgatgatgttacattgagcctcgaacgacagggactgccctactacgacgataaggtcggaatggaacaggctcgattgaaggccaacgaactgcgcgaaaagcgtcgcgccatgtggagaacgtaatgcatttcgtaaagacccttaccgttgtccgtatcatcccggccctggacagcatgattctgagccgtacattcgtcggcaccggtaagaatctggatgatgctgacttggcctgcattcagaacatccatatgaattgggacgacattcgttccatcgcgccgggtcatctggaacccgatgatatcgtcaactctcagagcgtcgccgaattggtgtcgctcatcaatcggaagtgggagaacaccactgcttcccaatacggttttgcactgaaggacgcataacataatgaatatggacctcgaaaagatcgccaacatgaaggaactgctgcgtgcgcagatggacgtgtacgcagaacgtatccggattctcgaaaaggtccctggggagttccccaaggtgatgatcgagacctatcaggaattcatcctgcatacaggcagggtcctgcaagctgcacacaacccccgacattaaccacaggagtaagctgtatgagccgtaagaccccgaagatcgagaacccgcgcctgacgatgggcgatgccatgtcgttcaagttccgcgtgatgggcaacctcgccaagcgctcggatttcgaagacgatatcatcttcaaagtgtccggtcaggcgaaattccgtgatagttccttcgccatgatccgtagcaacaaggattccgacgtgtggctgatcctgtcggcgaactccactgccatgatcgacctcatggaccgcctgcccaagctggccgcgaagaacggcctgaccatccgcaacatcaagtgagcgctatgaagaagcccaacaccaagaaccaagccatccgccgctcctgggcgtaccgcaaccgcaacatagatccgtgcgtgatgaaggctgcgtggcgcgatctgccaaagggggtcgtggtcatcatccggatcaacgccaaataccatgaccgactgaaaaccctgtatttcggcgatggttcgtcgctgcacttcgcctacaacgaagacaactacgtccgcaccgtgaagaccggcttcaatggcaatccggttgagcagcgcctgcaccacaccaacatgggccacgaaaccaagtggttcattccgttggccgaatcgaagaatgaaccggcgcctgcatgggaacttcgtactggcaatggaaagatcgtcggcatgattgccacggaagtgaagaatcgtgctgaaaacaaccgactgtccacccaggccgagattattcgtcagctgcgagagaagaatgacgagttggagaacgtcctgcgcacgcagaaggctatcaccaaggcatgcgagaagatcgcgaatgatcgcggccatgtcatcaagcggctgacacgtgcgctgatcgagcagacggattcgggcatcaagctgaaggccgcgctgcacgccatcaccgccgaagccaacctgatgggactgttgtcctgccttcgtccgccgaattcgaccgtgaccacaggtgatgctgtgaagcgcctgattaccgaaggcgatatccaccacgggcgagccaaggcactgttcgaagccgcgaaggctgaaagcgagacgaatggttgcgaagccatcaaggccgcccagcaggaagtccgcagtgagcggacgaatggcgctcgcgcaccctgggatcgttgatccagtaagctgttgttaaggaggacgggtctagtataggcccgtcctttaacgtatttggagacatgaaatgtccgacttgatccacgcacgtattacttcgacgcagagcgctatcatcgagaagttcactgaagggttcgacagcccttccgacaaggtaatttggttcatgcctcctggcatgggaaagagtgcagttatggaagagttgcgccgcaagtacctggatggtgaaagcaccaacggtaaggtggctactcggatcgaatgggatgaacacgaaccgattacagcagagctgcttcaggaatggtgggatgctttgaaagagcagcccgatgctgtgatcgtcatcgacagcattccgcacgtactggacctgaagcgacagttgatgaaagatgccatcgagaatgaaatgcgctcgttccttcctaccatgatcgatgagtgtaaggcccagcttttcccggagaagccgtggatcgccatgaatgattggcgcaacaaccgtcgaggtaagcgtaaccgttaattcacagttcagcttaacggacgtatagtacaaccatcaactacggagtacgcgacatgcacaccaagtacgacttctgccttttctacgatggccaggattacagcatcaccgcaggtatcgaacaggacaccgatggcagtggccgtcctctgatcagtgttgaaatcgaggattcggaagaagcatcgatcctcgaacgtaaggttggtccgtcccgtatgcgtgacatgattgtcgatgcgtacatggaaatgggctttgatgatccccgcgactgaggaacccgccatgaagaagtccagccgattcgccctgttgttctccgctgtggtcatgttcggtagctgcgttccggcccagccagcatacgcgcaaaccgcgcagcagatgcagtattgcgaactgttcgtcagtgtcgccgagaagactgtccatcagcgttacgaaggtgttacgatgcaggaactcctggactacgctaacgggaccgacgtgtaccaggatatcgtaccgatgatccgcgaagcgtactcactcccgaaggtgaacgggcgccaagcgagggccggacaggcattcgaattcggtacgcgcatgtacgtcaagtgcgttaacatgatggttcggttatgaactgcgaactgtgcgatccgaatagcaaggacccgcgcagaattttcatgcaatgttggtgtggagtgaggaacatggaacaggaaggttacgacgcatacgtctcgattctggcaaaaggctttgaaccgtcattctttctcggtatgcaggcgtgcccgtaccctctcggtacggatgaccgcaaggcatggatgaaggggtggggtaaggcgagggaggaagcctaatggcattcgacaacaagaccatgcggcgtgtggtggcgaacaagcctcacatcgcgttgatcgatggctggtggcgggttagcgcgatccagctgaagggcaggcgcttctcatcggtgccgacctgggccggagataccgcgcacgcccgctggaacgcagcccaccggttcatccagcccttgaaccatgccctgcactggtgcccaacgtgccaccagcggcgccggtaggcccaggttcagcgccgcacaggcagaatgatccccgtaccctaagtgcggggatttttcttaccggagattcacaatggcattgctcaaccactacaccaaagcgcagacttacttcgatatcttcaagactaatggctacctcgcgccagccgatcacagcgatttcctgtacaactgcactgaagcgctgaagcatatcaagggtccttacatccgaaaggatatgctggatatgatggaagaggttgtgcatgccctcggaattccaggcgctatgtacggccacgctcctgggtatcgcggtaatgaactgttccaacttgaaccgcgccagggtgatgacttccgagacacgaatggtcgctggtgtcacgcatccgatatgatcggagtagtaatcaactggcgtgatgaggaagaccttgcatgggagcgcgaacaggagtacgctgaagcctatcgtgaatctcggaagcccgaatatgccaactgctaaagaacgacgtaatgaaatcgctgaccgattggagaacctgcgtaagcgggttcaatgggacaccgattacaacaccctcaccgacgcaatcaacgaactgcgtagcatccgtgacaggacattcgcgactgtgccgaaggggactctgaagccgggtagcgctacttggcacattgtccgtctcctggaacgaaccggtcgcggcatgaccacaaaggagattggtgccgagctaattggtggcgggttcatcaagtcatccgatagtcgcgacatgtcaacctacctcaacaacgcgaggaagggaggtgccatcgtcaagcatctgatcaagtccgaaaagaactggtgggggtatgaaagcacctacgcccttccgggtgtcgaagttgaaggggagcgctatgtcaaacctttccgttgaggaacgtgaccgatactggtggcttctgtttgccatcagggaattaggagagcatgtcttttccggccactctctgcttgtggaccgataccgtgatcggtggcaccggaatccgactgagttgcatcaggacctgtgcaggatggaaacgttgtcctggataaggttgcgtaatgcacatcgaaccatgtgggagcagaaggtagatggtgtagtgaagcatactactttcgaaatcgacattcgttcgcatgggtacatccagatgaatgaatctcgactgtgtacctatccaagtattgcggaagagttccttcgtcgcgtatgattactccatcagcttaacggagtcagtcatgtacgcagtagccaagcacggtaagaacggcaagacccttttcttcggcccggccaacaagggtgcgccctggcaccgcaaccccgagttcgtcaaggaataccgcagcgccgataaggcagctgacgtagccgcccgctcgggtggttgggtggtcgattcggatcatgcacgctggaactgcggcgagcggcaggtttgcacggacatgctcggttaagctggcgttcggtatcatcgcattcacattctcaggagacccccatgtcccgtttcatcgaaatcaaaggccgtatgcaggccgacttccccaccgacgaagacttccttcctgatctgatccaatccttgcgggacgaatacccgtactgccattccaacgccaagctcactgatggcggaacctgctggcaggtcacggtcatccacaagaaacctgttccgctgaaggaaatcgtggtagcgaacattcgcggtcatgtccagggctggttccatgcttccaccggcaccaatggtcgctgatcatgagtcgcgtttccaagctgaaggatcgctatcagcgtgaagtgatccgcacgttcctgtcgatggggttctacctcaccgtcaacaacggccatttcgatatttgccgacgtgagcgagattacggtacgatctgcgatgccatgaagtcggcgtcaatcgaccgtattaccctgcaccgattcaatgtggtcaaggtcgatccagttgcagtaggctgggttgaaatatcgcacgaaggggaccacagggacatgttcgccgattacagcccgagcatttcgttcatcatggataagttcgatgaagcgattcgcaacgaagtaatcatcgacgcaaggaagcgcgcatgaagattgacgttcgattccttgtcgatctgtgcaaggtcaacgccagcaaaagcaaagacccctccacccaggtgggggcggtcattatgcgtccagacggtacgattgcatcgggcggtcgtaacggttttgaaataggagctaacgatgatccggcgctgttccttgacagaagctataagctcgcaaatatattccacgcagaacacaacgcaattcggttcgcacgggaatccctcgctggatactgtatttgcgtttggccgcttccaccctgcgaatgctgcatggcacgaatccattccgctggaatcacagccgtggttgcgcccattgtccatgagttgaaccgttggtacgatactggactgcgcgccaaacaattcgctttgcaaaatgggattacttatcgtgaatactatctctgatcgtttcgcgggtctcgacattgatgcgatggtcgaacagatggatgccgaagaggaaaatcggcccaagcccatccccatcgagaaaatcaccgagcattctgcggccctggaagcggtgactgccgccgaagaggcatggcggaatgcgatccagcagcgcgatatcgccctggccgcgcacaacgagggtattaagctcctgcgcgtgcgcctacagcgcgcccgtgacttggccgaccagcttaagcctcgccgaccggtgggccgtccaaggctctacaagcgttgacggctcgctgaacgtgccgtaagctgtcccctctttttcaccgagccgacgcaatgaatcccgccgtacaatttcgtgagcaatacgtcacatccggggaaatccagcgccgagtcggtatctcacgttctgctttgacgcaggctgtgcaggcgggaaagttccccgcgccgatggacctcgaagaacggcttcatatttggagccgtgctgaagtcgaaggaaacatcgccgcatgggccaaggcccgcaatcagaacaagtgagccgaacgtgtaccgaccgaattgggccaatatcccgctggaactgcgagaacgtgcgcagtggtgcttcaccaacccgaacgccgaagatggtcagaaaaaggcaccgcgtaagcgcggtggttatcgtgccagcaagaccgatccttcgcattggatgaccttcgaagaagcctgtttcaacgccgagcagttcggcggggaagttggtttctgcctgagcgagtccgatccgttcacctgtattgacctggacgtaaagaactccaagacccatccggacaagccctggatgtggacgactcagagcgacatggatcgccactggaagatcgcacagaccttcgacagctttaccgaactgtccgctggcgggttgggtctccacatctggctttacggtgatgttggcaagggcgcccatttcgggccgaccgaagtctactcccgtgatgcgttcatcatctgcaccggcaacgtggtactcccgcgactcatggctgcgaatgatgagttgttgtcgatcctgtataacgagattcgcgaacagcagggcgcggtcatgggctatgacaaccttgccgagggcgaggaagtcaagagcgacgacgatatcttccagattggcatgtccgcacagaacgcagacaagttcaatcacctgtgcagcctgaaggttgaagacgccagtaagttttatccttccaattcggaagctgaccttgcgttgctgtcgatctttgcctactacacgaagtcgaacaatcaggtgaagcggctgttccgctattgcccgctgtcgcatcgtgagaagtcccaggagaacgacgtttacctcgaccgtaccctggctggtattcgccgcaagcaagcggagaacgaagccaagactgcgtacgtcgataaggcgacgttgaacatcctggacaagcatgttcgcgaggcacgtatcgcgcaagagattgcgaagaacgcgactccgaccagccctgtcccgaccaacattccgccagtacctcctaccccggaacagatcatttccgatcttaccgagattccgttgccgtcctacgttaccgaacagatggcgattgaattcccgaccgggaaccttgggctgttggcacgttggatgaccgcgactgcgcaacgtcccatcggcgagattggcatcgcgtcggccctggcgttctattccggcctgtgcggcctgaagttctccatcaacgattccggcctcaatctctacattgtggtcatcggtcgctcgggtatcggtaaggaaaaccttcacaacgcaatcggtcgtgtgtgcaacgaagtgcgaggtacggcagcgacaatcgataagcgattcgacagccaggactaccgttcgcgccctgcgatgatgaaggagattgctcatcgtcgcagctacctgcacctgttcaacgagtggggcaagatgctcgaatcgatgaacaatgaccgtgaccacaatgctgcggatatccgccgcactatgctgtcactgttccataagagtgacgttggctcggttgtcggcggcgcggcatattcggacaaggaaaagaacgttgacctgaacggcccggcttcctacgcaatggttggcgaaaccactccggacacgttctatgctgccatcagcggcagcatgttcgaagatggtacgttctcccgattcctgcacatcgaaaccacggccaaccgtggcccgctgaatccgaacagggcgcatccattcccgtcgcaattgcaggaatcgatttccagtatttcgaacctgttctccgatgacgtgtattcggactcatcgcgaatcccggttttgatcctggacgaagcccgcaatcgctacaccgagttggaaaacgagttcacggatatcatgaacgccaacccggatgacactgcaactacgatgatgtacacccgtgcgggcattaagattcttcgtattgcggcactacttgccgtgtcgaacaatcactccactccccaggtcagcctgtctcagatcgagtgggcttacaagctggtgaagctggacattgatcgcaccatggcacgtgtcgccgcaggtgaaatcggcaccggtgaaatgaaccggatcaagatggttcgttcctctatgcgactggccttcaagaacatcgcaatgttcgacgctcgccatcgcaacctgatcaaggacggattgattccgctgtctgtaatccgtcagctgtgtgtcaagtcgatcaacttcaaggataagggcaacctgagtccaacgaggatggtagacatggcattgaacgcacttgttgacagcggtgatgttatcgaagtaccaaaaccctctctcatttcgcagtacaactacaccggcaaagcgttcgcgctgaaggattgacatgaacaacaacgaatatatcgaactggcccaggttacgaataccatcgactacaaggacggaatgggtcgtttcctggtggcagaaatcctgggcaacatcatcgaagctggtggcgcactggacgcggtgaagaagttccagttctacggtcgtgagacggaagaaacgcagggtctgttggacgtgcagacccatagcgcgatctacagcaccgatgactggtgcgacatgatcgacttcaacaagttgttcccgaacctcagccgcgaaagcgcattgaaggtctaccacggtgtaatcggcaagatcaccgaagctgtggaactggccgaaatgctgcgcgaatctttgctgactggcgaaccggttgacaccaccaacctgatcgaggaggttggcgatggcatgtggtacgacgccagcatcgctaagggcctgaacactccactggaagccttccagacgatcaacatcgagaagctgaagaagcgcttcggtggcaagttcgatgctcacaaggcgcagcaggaaaaccgtgacctggacgccgagcgcaagattctggaaggtggcgtcggcaacgatttgcctgcccgtgtgcagcgaatgctcgcagagtatagcgaactcgggaacaaggcccgcaagctggccgtgttcatcaatagcgacatgttcaagaccctttcggcaaatgaacaacagctgatgtatgaccagcaccatggtatgtgcgtatacatgaaggccctggattcgcgcatcgaaatcgcaattgcgaacgagggctgaacaagtccagcagccctattgtggtcagggtaattcctggctacagtagggccacctaaccacaggagtacgtcatggaacacgatctgccgaaagaactctccgacaagttgcaggaatacctgcgtgtgaacaaggaagccggtatcctggccgataaggctaagaaattgcgcctcgaaatcgcgaagatggctttcccggacccgcgtgagggcagcaacacccttgccctgggtaacggctacaagctgaaggtggaacacaagatcaatcgacgaattgacgtggccgcgctcacgatgttcaaggacaccttcgaaggggccgatatcaaggtcgatgatcttgttcgctacaagccagaactgactgtcggcaacttcaagaagctgtcggaagagaagcagcgcatcttcggccagtgcctgaccatcactgaaggcacgccgaccgtcgaactggtcgagccgaaggcgaagtaagcaagcgttcagactgagggttgcatactgtaaccctcaacccaaccacaaccaggagttagcaacatggcacgtaccgcaaccaagaccaaggccccgaccgcagtcccgcagactgtgatccacgaaatcaacgagaaggggcagcatcgcatcgtcgtgatcggcacccattctgacaagggcgagtgggtcggacacaccgaaatcgcctgcctgggcgcctaccgcgcaacgaccgagttctacaagggcgtcctgccgcagggcgttttcaagaccgctggcgtcgccttcatcgcgatgtaaccatccagccgccttagctcagtcggtagagcagctaccttgtaagtagacggtcaggggttcgaatcctctaggcggcaccactggaacggacatgaagatcgaaaccaagttctccctcgaagataaagtagttgacgaaactcgcacctacgacttcgagaacgaaggcgtcatctaccgcatcgagttcgaaaagcgcggaatcttctacgcagttcgcgggaagaatcgcagctggctcgcaaaggaaggtgcccttacgttgaagagggacttcaagcccaatctgccggtgggtatggaacccggtgaaatggcatgaggtttcttaacctcgactaccacggggacgaagtagccgacattaccttcaatggtaagccggtccccgccagtttggtccgcatggcggatgacaaaaccggcgaactgtgcttctatgtactggattcgcagaagcgtttccagtacgacatgaccacaagggatgccaaggtccatacggtccagggcgtcgttacaatcaacatcaaggcgaagccatgaaccccaaccccggaaacttcctcgaaaccgcagccaaggaaaagctggccgatatgccactgttcaacggcttcagcgacatggactttggtcgcatgcttgaactcatgcagcagccggtgcgagccatcgatacctgcatgggcaaggaacagctgcgcaccgtggctcggcagatgctggtccagaacctcgcgttgcagacccaggtccgcaaccttcagatcgaagtgcagaacaactcccaggctttcgaagaagctttcgaagaactggacaagggcgtcgccctgatgaccgactacaacggcatcgaagacctcatgatgaagctggccgaagaacaggacattgctgcggcgaacgcagaagtccagggtcagctggcactggaaggctgaacatgaccaagcccttcaaaccaatgaaggcaacggacgcggacctgagcaaggtccgctttccgtgtgtcgtcatgccgaaaatcgacggcgttcgcggactcaacattggcggcgaagcattctcccggacgctgaaaccgatccgcaaccactacacccgcaacttcttcagcgatgagcgactggaaggtcttgacggtgaaatggcggctgaggctccgaaccatccgcgacttgtcaacctgacttcaagtgctacttcgtcgcatgatggcgaaccgttcatccagtggtggattttcgactacaccacgaaccccgaccttccatacctcgaacgtctggacttggccgaacgccgcattgaagcggtgaacaaggtcactccgaagtatcgcatgcacctgcggctggttccgtggcgcctgtgcaagaacatggaagaactcctggcttatgaagaggaactcctggacaaaggctatgagggtatcatcatccgtgacccggatggacgctacaagcatggccgcagtaccgttcgcgaaggcggatacctgcgcgtgaagcgatacgtcgaagaactctttgtggtcacggctgttgagtgcgccatggagaacaccaacgaagctaccgtgaatgaactcggccataccaagcgctcgactgcccaggctggaatggtaccgaaggaaatgatcggcaggattcatggcaagtgggcgaaggatgttgaatggaacggtaaggttctgttcagcaaggatgagccagtattgatggggccagggaacatgacccacgacgaacgggagttctactggcgcaatcagcatctgttcatcggcaagctgggaaaatgcaagaccttccccatcggtgtgaaggacaagcctcgattcccactgttccaaacattagtcagcgaggacgatatcggttgacaagttagcatcaaccatgtaagataaccaagcccaacggagtaaccacaatggcaatcaggctggaaacagcatcacagcagacagcgaacaacggggtgaaaatcctcgtacatggtcgctcgggcatgggtaagaccgtgctttcggcaaccctgggtcagcgcaccatcatggtgtcggctgaagctggcgcactgtcgctgcaacgcaagaacctggaacgcatttacggcgtcggcaatccggatatcaactacgacatgcacatcatcgtcgttgaaaccgtctccgacttccacgatgcgtacgactggatcatgagcgaatatggaaagggttatgaggctgtcgccatcgactccctgtccgaaatcgccgaaaagatcctcgccaatgaaaaggcgaagaacaaggacggtcgtatggcgtacggcaacgctgcggaagagattgagaaaatcgtccgcaagttccgcgacattccgaacaagacggtctacatgtcggcgaagaccgaaatgttggtcgatggcaacggcggcgggatgaagtatttcccgatgatgccgggcaagaagacgggtcagattcttgactacttcttcgacgaagtgttctacttcgacacgtacaagcacgaagacggcaaggtctatcgtgtgctgcacacccaggtgaatgacactttcaccgccaaagaccgctccggcgcgctcgacgcaatggaagcaccgaacctctccgcaatcatccgtaagatcaagggctaatagctatgaactccattttctcccgtgctaacatcgccgctgacgaacgcttcgacggccagtccaccttcgatggcaagccgctggacccgcagtggtacgctgtctccttcctggaaaccaaggtcgatacccgcaacaacggcgccagcaaggtgatcgcacacaagctggaaaccactggcaagtacagccccggtcgctggctgttcctggacctgtgcttcgaaggtggca

SEQ ID NO: 10 - DNA, 304709 bp, Unknown
  source: /note="Description of unknown: bacteriophage strain capable of infecting bacteria of the genus Pseudomonas"
ataattttcattcatgtaagaaacaaaaaagaggaaaagaacatgtcttctctcactaccttaactggttataaagctgccatcgaacaagctggcattgatggtcttagtcaacctgcacgcaaactaatgcaaatcggtctatctcagatagataccgaacatggttttactagcgtatctactgaaaactttgaagaaagtatcacagtagaaaatattgaagagcgtattgccttcattagcaatgaagaataacttacccactatgtaatgatatgtagagacgtcactcctcgtttttacatagaccacagctcgccggagccagcaacccttccagctggcttctaggaagtaagactccctgttgtggtcccctcctttcagttggtaagttgtatctttctccttgttgtgttgatgagcataatgcctcccatcgggaggctttatgttgaaaaatactgaagagcctctatttatagagaagaaatgcccggttggtgaaattggtagtacacaagagacttaaaatctctcggcgaaagccgtgtcggttcgagtccgacaccgggtaccaaatttacggagtgtagcgcagttggtagcgcgcctgctttgggagcaggatgtcgggagttcgagtctctccactccgaccatttaaatatagagcccctctgtcatagaggggttttatattgtatcgagataatagacatgaatatcgcaacaatgtttgttttagcgattcacgtggggttgtttggaattacatccacagaagaatcgactatccagtttgaaaataaagcacagtgtatttcgcgtctagatattttagaaaacaagtaccgtggatacgagatactacgaacagagaatacgttgaaagttactaatcctgacgagtattctatttttattttcaaatgtctttaagagaaattatggaacatcaagaacaaaaagcgctactaaaagaaccattgcagaaactctacaatcttacgtttagtccccgcttacgtaatggagcgaaagctcccgattggattcgccttactgatgaagtaaccctattcccaaacggattagatattacaatcaacgctattacacgttgtatcaaatgggaacttatcgaggagagtataagtaatattacttatgttgaaaccatgttctttaataaaggtcttaaagcagttgaaacctatctcaaacatacggagtaaatatgaatcatctaaccccaacacagaacgctgtatatttcacatttgttagtcctgagtttatgaaactgactcttgttgaatcttttgtagctatccacaagaaacatccagaagtaaaacattgcgttaagaaaaagattagtgataatgaaactcagtttatctttatcttcaaagatggaactgacaatctaatcatcacacgtaagactgaaccctgtcctgaactggatagtccagtaggcgatagaattaagttgtctggcgaagaacttaaaaatattcttaccaaacatggccgtcctaatgatggtaactatttcaagcactggactgaccgtccatgatgtcataagagccctatgtatactaatatgtagataatgaattagggtctatagctcagttggttagagcaggcgactcataatcgcttggtcgcaggttcaagtcctgctggacccaccaaattaataaagcataatacctcccttaaataggggaggtattatgctgtctattataataaaataaatatctgagccgcaaaggttatcctatgatctaaaatgatttacttgagagcacactcatgtttgaattactattatcatcaggtttaggcgatgaaacacccttggttggatttagtgaaattataaaattaggtgacctaccagtagcattggcaggtacgatgtcgtacgtagatggaaatacgttatatgttggatccggacatcatacggaaggacaatcagcagcaactgttttcagacggttcactataaacccatttgcagagataagcgcaacagcatctggtacatttttaccgggtgtatcacttggatttggtacattacataaaaataactttattgtttatggtggtattactggatggaacgcagcaggtgatgggggtacaggtacttctaactttatacaacattttgatataagcacaggtagtcgcgttgagcgttatcgtggtcctggtgcattatggggaactgcgtcagcgtctgatggcaatgatcttattatgtgtgttaatccagttggtacaaacgccatgcgattaaaaccatcgactaagaactggctcggcggtcaagactatagcggtggacctaggtcaggtcaacaattattttattataatggttatttctaccattttggtggctgggataatactaagaacataccaaacttagaagtctatagatacaatgttactacacttgtatgggaactaacaccatggctaataatacctgctgacaaagcaacaatatggcaaggtaatggttatgtagatggggaatattttaattaccttaatgcagttgatgtcggcggtgtaactaaaatgtttgcacagcgttttaatattaggcgccggaaatgggctgaaccatttgaactaggtattggattccttaatatttcatctatagccaaaggaccagataatagcatgatcattgcaggtggatctaaaatgccagttggtggtggagcatatatgttaaaaagccaattgttatcaggtatctatcaggtaaaactagcaccattagccattgattaaaataactatctaactcagattgtaataatatgtagtgaaatactgtaattcagttacttgtgatttttctacaagaaagaagttgttaataattcttccgcgatagctcagtcggtagagcaactgactggatagttttcttggtaagtacccgagcggtagcagggggcggactgttaatccgttggcgaaagcccatcgtaggttcgaatcctaccttaccagccaatttcaaagagtagctccggctactctttattccgtcacatagatcgaactagcgatctatttatatatcctaggttcgatatgaaagagaaaataattaacggctatagggcattatatttacccgaacatcgtcaagccatagctaaccctaaaatgtttggatgggtttacgaacatcgagtggttggagaagacaaattaggtagaccactttacgatgacgaggaagttcatcatctggatgagaataagcttaacaaccatccagagaacttattgattctccctcagtcacaacacatgaagttacatggttggatgaaacggctcggtattgatcctaggaactatccaactaagctttgtgctggctgtggtattgtcattagtcaccgactgataacattctgtagccccgagtgttcagccaaaggtcgtcgtaaggtggatcgaccatccaaagaacaacttgccctcgatgttacattgctatcacttgtaaaaataggagagaagtatggagtatccgataacgctattcgtaaatggtgccgagcatacaagatcaatattccggctaggtttattagggtcggtgctaatgggggtattagcaccttggtccccacacaataaaaaaaaaatatactgggtccctggttcgagtccaggtcgcggagccaaattcaattgagtagccattggctactcttttatgccgttagtggttatcttatgaatcattaatactaactgagagcacgcacatgttcgagatattactcagttctggtgcaatggagagagctccatatgtacccttttatatgcgaaccaagaaggtagctgaccttccagtgggtattgcaggtccaatcgttgcaatggataacgataacttatatgtagttggcggtcaagattctactggggctatccgctctgcaactgaaatatttaaactatctgatatgtcgatgactgttggtggaaaccacgctagaactatttccatcaatggagcaactatttataataatagaatgctaataccaggcggccaattttctactaatttagctggtcttttatcaacgacaggtgcattgaatttacctgggttaactagtgcagttgagttaacgggacgtttaccacagacgtcgtatgggaatgctgtatgtcagcatagaggggatatatatgttttacccagttataaagccggattctataaattaaatccacttactggcgcgactcttgaaaattatccaggattaccaagttttgatgatgtcggtggtgggatattagcaggtatgtcaatttttggacatggagattatatctattgtttgggtggatgggcaaataatcagaacctaagaatacatcgatttaatctgatttccaaacaatgggaattatggcagacaatggaccctgcgtatcaccatgtatggcatggtggttttattgatgaggaaggttactataactataccggctggggtaacctcggtcaaggtaacaaaatatacctccatcgttataatccagtcaaaaaatcttgggcgcgctcgtcggataccggattatcatatcgaaacatgtcgggtgttattggactaaaagatgatatttatattgtcggtggtacatctgaaccattctctactaattggactagcacaacaaataaaataaaagaaatctacaaggtatctcgtgctcccgaaaactgggaacctgtcccagagaaaacatgggtaagaaaagcagacatgcctggcggtagggtgcaagcagccgtagcaagtacttattcagaactgttcgttatgtttggtagtgatggtgcagtaaagaatacaaacttgatttacgatgtatttactgatacgtggaaagaaggaccagttaaaccatccgcacgttatcaatcggcagccacaactgtcgccgaccagattcttattttctctggtagtaactattctccagacctgtattcttataaccatctagaagacaagtggagtgacagtatatctgaaccaaacgcacccacatggcggacaaaccactgcatgacatcttttggtagatatgcctatctttttggtgatgatggacgtaccgatagagctatttatcgttatagtttagatgctgcggctggaagcaaatggtataaattacctcaacttgctccagaaggattggctagagcggcaatggttatagtgaataataaactttacattgcctgtggttggattagttccaacaccatgactaaaaccattcgtgttcttgatttggtcgctggtacatggtctaccatatctaacgtacccgccagctttgttgctcgtgtaggttgtctattagctgcgattgataataaactttatataggtggcggcgctagtccaagcactggattgaatgatttctgggaatatgatacagtcagtggtgcgtggacaagactccccgacattcctataaacggcgatgctgctatgatggctgcatgtgctgataccttatatatcgctggtggtaatagaccaaacggtgtgaaaggtaatgagctctacgcatataggccataaaagaaatactggtatggtaatactatgtaagactataccagatttcggagagataggaaaattggtaaccccagctgactgtaaatcagccgtccgtatcgggcattactggttcgagtccagtcctctccaccaatgcgtcatagtgctctcccttcggggagagctttatgtcaactattacaaaaggaaatagcatgtcagcattaagtttgattaaacgttggtcgcccgcagtacctaagattctattgagcccacaggacacggtcaatgagactaagatggtcttagataacgagagtggagaatatataaagtttaatgacttcttgatcctccttcaaaacggcgtgtacctagaagccaccaaagagatgcacgagactttgttagatggtaaagcacagcaaagtctcattgctcgactcagtcgcatgggttatgaagactttgatcaagtaatgaaagtcttagaagaacagcgtgattctgtacttaagaagaaagaatatgaaatttggcaagaaggacatcgcgctactggtgaatctagtatagccagctttgtaggtaaagctgaaggttattctttcttagatgctgtagacaactacatgaagacagctagtgcggaagttaagaaatgtttccgtgctgaactagatgcagcttatatttggggctgtcgtttgtttgacaatgaagccgacgcacgtaaatctttcgggtgacttatggttcctaatctttctataaaagcaattcatgctcgtcaaactccagaacaacttgctggcaaccgagagaaaactcttgaggccctggctaagttcaaccaggctcaacgtaaacttgaagagcattgcaaacgcaatggacttgaagtaccaattatggtttgttaataatgactgatgacaaaaaagaaaaacagcataaagggcgacaagccctcaatgtagttggtgaaatcattggcgctgtgttcgaagctatttggtgggtcttgacctgcccgttccgtttaatcggtgtactctgtacgcttgattaaaataatacctagttgattacaatatgtaacgaacaaagttacttcatcgaaagctacctgtagaaacatctcacattaggtccagcagactgtagtatttcgatgtgaccatttatagcacccggaaaccaaaggctaatagtggcaagccgatgattgagggaagtcgaatgggccgcccataccgaaaggtgtctcttcagttccactaactgtcacctcacgatggacattacgatcaaaaagagactggttttaatgtccgatatacgactctccgataaggagagttttatgtcgttttatactgggctatataacagtatgtcaaaggatgtaaagaggtaatcatgacagctttcatgccatgtcatactgaggctgatatagacctagcttcaagaaataaaatgttgtcagagctacttatagaagaattcccaaatacagaagggatgtcaactaaagcagcagaagactatctacggtctaaggtcatagataaattcaatattaaccatcccgaatatcaagcacatgtaagttacgattgtactacacgtggagatttcattacggcttgggtaactcgaagacttgcccttgtaaaacttgctataactacagaggatcaataatgaacgaaaacgcactgtaccaagacgatggacttggcgcactcattacggaaatttttagtcgggatctgaataagaaatttcaagaatggtatcgtccgattatggatgaccccagcattgaaaaggtacccgtttgtagaaacggtcaggttgtaaaagaacccgttaattttgtagcccttttgaaagaatggttagctaatcaagattaaaaacataaagcctcccttcggggaggctttatgttatgattttgacgaaaggtaatcgttatgtttgaagttttgttaggaattggggaatataaaagtaagcaaggttgggttcagctacagggacccgatgtcggaagaaatcagtcaacatctgttgttgtaggagacaaactttatatcttcggtggacgccgtgccaccactaatgcgtttaacacggtatccgtctatgacttcatagcagacgaatggaaagaactaccagctggagcgaacgttaacctacgtgctgctggtggtttagttggtaataaattttacgtattcggtggatatacaggttccgctgatacgaatacaatggtagagtttactattgatggcgaaactatcacccctgtaactcgatccaatggtggattggctgttcgtaatagccactgcatgtcggctattgataataaagtgtatctgtttggtgggaacggtgcacagggtattatgtatgaatttaaaagctacaataccgataactttacagtagctaatctaacaccaccataccaaatccgttatgcgtctctaactagtcatgatcgccgtctttacacgctcggtggatatgaaaccgctaacacatcagttgcctcatttagaagttataatgttgacaacaacacatggactgcccacaagaatggtcttgtaaatagaaatagacattctgccgtagctcttaataataagatctatgtattcggtggtcaatctggtacgagctctactccaaacactattaacaacgatcatattttcagtgtctatgatattgaaaccgatacatggtcaaacataatacttcctccgggtaagatgccccctactagattctatgctaatatggaagtctacgacggtaagatttatttatctggtggttacacgaatggtgtgtaccacaatgatctatgggtatacgatccagagaatccatgaaaacaaatactggcgtagtgattatatgtaaggattagcgttaagcattattctacatgggaacataggcgaattggtatagccagctggtttaggtccagccgtcgtaagacactgtgggttcgagtccctctgttcctaccatttcaatagagcctgccgaaaggcgggctttatgttgcaaattgtatgatttagtcttttggtaagtacctttaatgggggaggccttagacggtaagggagtaggaacgtgaagttctatacagtcacccctctgtaaacagtcacttttcaatggataaaattatgtttgaatcgttgttgtcagtactcattaaggtaacagaaaataaattacccggtccctccacctttgaatacggtgattcgacacttggtctgtatggtgagttagcaagtgataagtttataacttaccctcagttaagaacacttgttgaactcgattccattggtagtataaataccgatgccggctggattaaggtatctaggaataatgttgtcatgtattattcaaagacagctattctccgatccattagtccaaaccaacttgataccgctggtttaatagatggtagtaaagttattgtaattgacggaaatatgtttaaagtccgtcttatgaatgcgggtgaaaatccttattctgatattactacccaaggtaatgaaggttccgagttatgggatatttttggtaacgttacaaccaaaggaagctgggcgaaatatacagattctcaactcataggtgctgaaggcggtagttatagctgggcggctaatagaaatacaaatggtaattatctacagttttcgccttcgtctactcatccccaggcaaagaatggagtttatgtttacgacggacacccaccgacggaagctactaattatagaggatggcgtccagtactagaatatattccaccgaaggaacttaaaggtttatcgtctgtactatcgacagtaaatccaccaccacaacgtgggatgccagtacttgcatatgactcggataacaatgatatctatatggcttgtggatatacaactggaccaactgctttcatgtccgacctacatcgattagacatggatacaaaaacatggactaagttaccatcggttgtgccattccaaggtgaagccactaccacgaatatggtttacagtaacggtaaattaattcttcatggtaacccattgtcaactgggccaactatttatatttacaccatagctactgatacctgggaaactaaaaagctcgcggctattccaggtttggttgacgcttactacatcgaacgtacagccagtatagttaaagatgacatactctatattgtcggcggtttctctggtcgaaacgataagattcataagagtattataacggttgatctaacctcctactcaatcgatcttattgaaaatattctaccatttgaagcttggcatcatgatcttggatttaatgataataacgaattagttattgttgcatctcaaggtagattatctattggtggaacaaatatcacaccaacggactatataaaaattagtcccgattttagtgccgctgagacaatccctttaaatgcaccggctaataagtattcgatgtatagatctattattttcggtaacaacatctatattacgaataatactacaacacagttagcattggtacaacttaataaagaaccagagttaatcggagatcctttccctacaattaggtcgtatgaagaaatggtgattacatcagctggtgtgtatagattcagcggtgatgcttctaaaacaacacctgtagtcgaatacgaaattaaataatacttcgtgtctaatagtatacgagagtattcaattttagccgttatagctcagtcggtagagcaactgacttgtaatcagtaggtcgatcgggttcgaatccctctgacggcaccagtctctaatgtattgcaactggttgggtccagttgcaatatgctgtataattgattgaacctggagcaatgaattatggaagagcgttcgagagaactgaacggatatattttgctttataggccggatcacccagaagctaagaagaataagaatatgtgggggtgggtttatgaacatcgagtcgtagccgaggaagtattgggtcgtcctttatatgacgatgaagttgtacatcacttggatgagaacaggtccaataatcacccagaaaatctactaatccttcccgatgcaatgcatgttaaattacatgcatggatgcggaggatgggtatagatccaactaagtaccccactaaactttgtagatgttgtggttctgtacttagtacagagcaagaatattattgtagccttgaatgcacgggtaaaggtaatcgtaaagtggagcgacctgataaagatcagctcattgccgatctacatattttaccattaactaaaattgggaagaaatacggcgtatcagataacgctgttagaaaatggtgccgtcgttacgatataccagttccaaaaagattcaggtcgtacaagacgtctggcggttatgagacttcaatccaaatacaatgatgaatatactgaaagaccagatcctatggttaaacattatctagggtaaagacgtgtcactaaaagctttgcagggtatagctagtagtgttcctacaaatgaacaaaaggaacgattggctaaagttagagaaacgatggaagaactaaacgaatccattcgtaaacaaatccggaataaacaaccggggatagctcttctcaacaaaacagtaaactggggaaacaaatatgagtaaaactctagttcgtgcaaaacttatcacagaagctggtacctggatgtcttctgattgggggagtggatttatagctagtcggttcgttaagacgggcggtgataccattacccctaatgaattcgagtctctgatcactgactttgaagttggcaatatgctcgttgtatggcctaacggattgagaacttcttataaaacagaaagctttgataagaactttacacacgtgaaggacgagtattatcaaactgatttgcgtccattgttctatacagggagtaaacagtaatggctttcgcatgttgtaatgccgtctatatgaactacatcaatcgtgatggtagttttaacatcgatgtattaagaaaaatatttggcgttgtagacgatatcgttcagaaagaacgtacagatgagttagctgtatggcatgctaagaaacatgacgtacctgtagctaaggctacgtttgtaatcataggtggaattgagcaagaactctgtacctgcgattgccataagcatgacggttcgaacgttttacattgaggtgattatgagtacactggtacataaatacgttgcgttcacgcgaacttttaaactcactgaaatcaagatggataagggtgatcgtatggttcgtgttggtggtggtttcaataaaggtaaagggtttttcagagtagacttaggtgcacttggctaccgtataactcgccgaaatagataacataaaagccttccccactgatgaaggctttgtttcgtcattagagatcgttagaactcccactgcactgaacaaccccgattacgctcgtcttgctcgtggtgttatgacaaagacagttgctaccgatacaacaaatagagtgttgtggccactgtttaaatatagagggcgagtttaatgaagattacgttttatgggactggagttgcttgtaaggaatatcgtgtttatgcatcagccgaaatcactgatcttaatacactaacgccaattgcaaccattccagctactccgccttaccgtaactatcatgaagttgatttcaatgccataaagaacgttcagtactatgttgttattaggcaggtattagaagaaggtttattcttagataccggtcatactacctgtatagaacgtaatactggtgccttgtctaataatgccgacatgggtgtagacaggctacaaaggggtgattctacattgggctatttcggtacagtccctatggaagacttacctggactaacagaactcgtagcagcatatagctctctcaggagtgctgacctcaagggtactactaaacctccttatggaaagtttatggttaacaatgaggtatatttcattccatccagcgtacataactggttgtatccaaatgaagtatatgcagctgggtttgcagctgtcgagggaacacttgacggtacttatataactccgcagataaaaagtgacagtcgatctaaaggtctagttgaacaaggacgcgatattatctatcaaggacatacctaccgtccattcattatggatcaatggatgtttgataatctgttcactccgatgaacaataataaacagttgcggacagcatctaacttacaagttaaatatgatacaataagtaagaaggatgcttatacagcagttgcgctttctaataacaaggcatctaaatacgttaggcaaaatacagtcggggcaactattctttggtacgaccactggctattgtctaatattgatatctgctggaagctgatggaataaaaaaaaataaggcataagccctctcccgaaggagagggctatatgtcgtcttataccaactcgactacatcgtaatcgtgatgtttacctttaccggtccaccaggcaaatttaccgtccttgttgatccgataaccatctctttcggtcagaggattcacagccagataagtagcgaattggggatggtcgttatagactggaaaacgatcgataaggagtttggaaaatgggagaatgtcgcgcatcgacttatacagcggtgcggtgatagcacggttatattccgtcaggatgcgattgacctcaatgaatgtaggatctttttcatcgatcaaccatggtgtttcaccttcattcagaaggagctgctcaccatagatcggtatagcaacttcataatcctttacgaatgcgagaccacctttattaccggttacttcggtgtgaatgatattaccgttatcatcacgcatttgtacacgccaggtcataccgagcagttttgcagcgtggaccatcctttcaacaaaggttttgaaagtgatgagttcttttgcaatagcgatttcatgttgagacattttaatttccttttaaaaaagttggataacagaaatgatgacaacgacactgatgaacgaccacatcaatccacgttgtagcttatctttacgcatatcacgttgacgacgtttaagccgttcttcagggaggttgcgcatttgttttacctatttacgatattaactggtcttggttttgtattgatactaatcttgtccttagcttttttggctaccatacggcgaaccctatcactaagatcaatgtcgcgtgtaaggttatcggatgccgcattccaatgatcaaaccgacgaccgaggacagggtaatgtgcttgggcaataaccatacattctagtggtgtgaatttattttctgccgatgtgaaaatattattgagagattctaccccctcagcacatccaaagattatgggcttacgagtgggagttctacagtagttactaaggagacggtcatgtgtcctctggaacacatgtaaaacattgtcctcatcgatgacgatatattccgaattaagcgataatagatgttcgaaattctttgctgtttcagccaagctatgtacatcatcacctgactcaagaaaattcaaccaacagtaacggtattctgtgtcaccaaccatggtgaacgcttttatatccttaccccaaactttagcttcccatttattctcagaagcaaggtaaatcttagaatggttattttccacataatacggcactggtacaccatctgtatcagtgatatcactttgagtgatggtagtgactcgatccaccagtaaatctttaccgtcccatatgacaatagtcattatttaaattctcctgtttgtagactaagacggaataaaacccgctccattacggagcgggctattcgttagattaccgtactggaaagccggccagctaggtcaccgattatggtcggtaaccaatccagtttggtaacgccactcagagatactcctcaccagcggagatagtagtcgtcgtaacttcagttgtaaagactgccaggtcaatacaactgcttcggcttgatcctttggcatagatcgctagtagtctctccgaacttatgcggagagagcccacttacaccgaaagctcgtgggaattaggcgaggtcactgcggcaccctaatatggcgacggggagccttaggggagatgatccgggtgacctctgttctgttgggacatcagtcctcgtatatcattacaactcaagtattcttttacgagagtttaacttctacgtcaactgactcaagaccagtcccgtttcttttattagatccacgtgcaagcaggtaacgagaccaggtctccgcttgtactcggtcaaacttaaagtagatatgctgcatgatcatcttactcaggtcagcgatttctttcgacaccatatcaaagaacaggtctttgtccattacgtcagcatcataacgagccagctcaacgttgcaatactgtgcttttacttcatcatagaactcaacagcaggttcttgatggaagtaatggactttattatctttgatttcgatgccgtggagagtgatctcgatgtggttgctatgatagaaatgttcacgcatagctttattaaactcttccaccatcttatccagatggatacctctaataacctctttggtagtgaagaaatagttgccattcggatcaacatattgttcacgtgcccagagacagcacaagccgatagggatgaattcagcaggaatacgcaggtcacttaattgcatcgagttgatccttctttacatgaatggattttgtgataactgcacggcgttcttttgccgcttctgacatcattgttatttgctcttgcatctgagtgaacaacaacagttccagcatggtaagtaacatgtgctcaatccaaagacgaacacagatcttattcatgggtgcattatagatgaggggttgaacaacctttgccagtgctccagtcaacggacacgtgaagcagatatgaagattctcgctgtcactgtcttctgcccaatgaacgtcttcgccttcaccatgtaccatattcgtaacatgtgtgacaggttgatgttcgaaagcatccgggttgggggtaatccctttctctgcacattgatcaaaatagatatcacggataatagcactcaattccgctggttcgagcgacggcataaaaggaaatttgagtgttactgacatttgtaagttcctattggggttgacaaaataaacccctcccccgatcaaggggagggagctcaaggttggtagtgacaccagtcacagggatcagccgatagcagacccctaaagttgatgggactctaacccatcgtgtcgatcgttggattttagcccaacttaaccaaattgtaaaagagctatcgtaaaggatcaggaaacgcatatgatagtgcgtaacctttaactaaacgattacctccctaggtggaggttcgacttttgtccaatctaaagttagaggagtagctatctcttccttcattttgaactcaacgatagtacgctgtccaaagtgtttaacacctaacatgtatccatcgatggcaacttcgtattgtctacacagcttatggatgtaaacctcaatgtcagtttcaacacgaggatcttctgccgtaggacgatgttgatgatcccagaatatacagaactctaatttctgccagttactgaattctggattaaaggagaactgatgcaggtgtgccgtctcatgttcttctccaacatagaacattagactatcggtgggctctctagtcaactcaccgaagtcgactttttgcccacctttagtgagatcgacaacaatgagttgagaggccattaagagctccgtcggctatcggtcagagaacggatggttcgactgtccgcctcattacgatttttattacgggtccgttcgactacacggaatacattgacatgctgttcgtctacttcatagttttcaaacagttcaccgaagttgttggtcagagaatccacgatcagtcgtttagcatcagcttcattgatgtagtggtaaaggatgacaccacgatgatacaggaacagggggtagtcttgtccattgattcgaacctctgccgcaaaaccaccatacgacattgtatccgaattgatgtcctcacggtaaacatccagttgcacgttgttgatcgtgtgcatttggatcatgtcatttccatgaccaccgaagaaagtaggacgtttgcgtccagttacaacatcctggatagattccatcagccgggaaacatcagtgacaatttcaattacatcacagagcttgttaatagcttcgaggaaacgagctttcatttcgtcgacttcgaaactagaccatgcccgagtctcatggttaagaatgttgatgccgaaccaggcataaccgttattatgttttacctttacgcacaggtgtggtacatcatccagaccggactgatgattcaacgtataatcactgatgcgtttcaggaccagttgtacgaagggaagattgatgatctttgtcgacatggagctattcctattaattcttaaaaagagattagagtctacataaacactcactagattatgtagactcagtacattttaatgacgggtaaaactctgattcaagcaacgacccataggggaatcaatggtgaagttctccatgatctcgatcgcctcatcaatcgacttgaattcagctacctcagtaatagtgaagccccgacatttcagaatatcggcagcttgatcagtaacgaaattctgaagaagcttattcgaacggaaatgatgcgagtgctcgatcttaccgatgtagtacatgaacttggtcagtacttcatattcggtggtattactattacgagttttcgtcaggaaataatcagccgatttatcatggcgaatgacgaacacacgaccattggaagcttttcgtggggccgatctctgaagtagttgatctctttgttccagctcttcacgcagttgttccacgttaatctccggtttagtgcaaaaccagagatccagtttctgacctgcctttactgcctcgtcaatagcaaccggcatgttagccatacttccagaacggaagcgttgcattacagcagcaaacgacggagactctgcaagccacacgtccccggtatcacgggtgaccaaagcataccaaccctttttaactttaggtggggttgaggtattggtgaagtcagccatgtatttcatgatcaggcggcgagtattctcgtacgctgcggtcttggaatcattagtgtacatcaggtactcctcttagaatttgtattttctatttaattgagaaaagcggtgggttttccccaccgcaatatatcgtcaaacgatatctttcgggatagactcgatgaaggctttaacgtcattgcggttttctgcaaacagagcttgcagatcacaaccggcaattgaacggaacacaatacctttatccacttgagtagacgggaacatcagctcgatataatcacgaacttctgcatcctccagcagaccgatctcccattgatgatcaacacgacccttacgaaccaatgctggatcaaggtgctctggatggttggtagttagaagaatcagcgatccatccaacggaacaacaccatcaagggcatttaacaggccagagagtgttaggccacccatgcgagtatcttcttcacctccattcgcacgacggttatgaagttcccatatgcgaagcataattgggtcatcggcaatgtatttagaaaggggttcttccggcaccggtgcatcaaagctgtttccaatgacatctcggtattggcgagattcagttgggttgtgttgctgatacccaacactgaaatcttcaccgggtatatcccatatacacatgggtccgccaccattatctatcactcgatagttagtcaaccccatctgagtgataaggctatccaactcatcttcctcgccagctgtcagtttcttaagcgaacgattctggactgccttattggtatcgaagtcctcgatcatcagaacactaccagaaggcatagacgtaaccgctttacgaagcagttcatcggagatactggctaaagacaaccaataaatattcttattaaaagccgaagcgattgccttaccgatagatgtcttacccgtaccagggggacctgaaagcatagcgcacattttgtacggcatgccacgggattcataccactcccgcccagagaagaactcttcaatcttaccaatgatctccgctttttgtttgcggttcatgataactgtgttcagcgcgcgtttagtaatcgggatagaatcaccccaacgcaaaccttcccatggaatgacgcagacttctttatcatctcccttaacacggaattcctctacaagatctaacagtagttgagtgttcctagtcaagccgtggatctcaatctggaatttttccatatgagtaccagagctatccagcttagagcgattgaaccagaagaagcgccctttgtagaagaagaaatgggtaccaaaaccagcgccgatatcggtgctaggagagggactaccattccacatagagttcaacgatagcttccgactgaacctggcaataggttgttgtttgaaccacttcatgaaggcgatacattgttcttcattagggccatgtccaccattgttcattatcagggatgtgacgacctgattccgaattgcgttgaacattttcttaggtaaacttcgcgccatcataagcacccagccacccaaaccaacaccgactaaagatgcgaatgtcggattgatcgacatgatctctttgtaccaggacataaactcctgaatcatttcttttccctcacatagctgaagtttccacgagtgtaggtattttggatcggatgcttctcgatgatctcatggttggccatcgaaagcatgttttcagtgagtgcgggaatatattccccaccgatcatgtaaccgaggttcttcctttcttcatcgccaatgtgacgttgatacaaaggttgctcataggtcacaatgaatagaccggtataacacttgaagatgataaagcattgtccacggaggaacttataccgccattgctgctttttaattttctcaatagggaaccggtattctttaccaccttcacgggatagacgacgaatctcgccggcacatttctgtgcccaggatccttcaccgatgacatagatgtcttcgatcaaatcatcataaccgggacggaactcggcctttctccctcgggcattcttgtagatcttgtacgattgaacttcaggaccgaaccagaatccttcagtgaagttcacgacgtgcggtggacgatacacattacgtgtgatttttacatccatcttaacgtcgccgttaagggtgaaatcttcgatatacgccagacgacgcatcagtagatgatacgggtaaagcttttgcgtctgttctcccggcaaatgaaaacgaagaagatgtggtactacgttatcggaaatacgcatccgatggttcttggtgagttcactcagattgaatgacttaatttcctcgcgtgcagtaatagccgcatacttggcatattcattcgtggcgtcattaacgtaaatgttcatgacagctgtgacactttcattgaagttcattgcattttccttttggttaagcttaacggcataaaagtaatatagacctctaaacggttagaatagaggtctactttttctagaacttcagttcatgctctctagctttgaataccagaggacgtgtacgatcttggacactgaccacaaattgatcagtaccaggaatctgaccgagcagagttaggggttcatccttttctgcacagagataagaagtccgccctttcaaggccgaagcttcgatacgttcacttgcacgaacagtaacacggtatgtcattttactcactcaaaatcaattacacgccaacgatcatacccacatgcagcgagtagaccgactcgttccattgcaggcacatagcccgacagcttaacggttttcagttctccggtttcattcccatgatgcaacgacttcgcaatagcagtgtccggataccactgggtcagcggaatcgaagtgttataggtataaccgcagaacacatcataaatgtgatgatgttcattaatgaacagacagttaccctgtgcaccattatcacggtgggtttcttggatgagtgcacgaatctcactcaggtgaccagaggtgaagctatcgtaaaaccggtcaacatcgtcatcccagagaagatcacgaatacgacgaaccagagtatcctcaccgccgatgataatacacttgagcttttgtttacgttcctcctgtggagggtggtaggtgttgtcattgttttcatggaaacgaacgacatgagtattgaacccacagtccttgcgaccaaagaaaacaacttgatcgccataaacggcttgcgcgaaatgcatttgtcctttcatgttcacttctccagaatatgaacttcttcaccgcgttccaagaacggcagataagtttcgtagttgttaatgacccattggcaggattcgtgcttcggggtatcctgaatgaatacacgcataaaggtcagaaggtagatcagagaagcacggttgaaactcagaccagcctgttcccactcttccttgtattggcgggccttatcgatgtgataatccaaaccttccaatgcagcgatgttaacaccatcgacagcgttagccaaatcttcgatcatgtacgggaaaaccagatcgacgtactcatcatgttcaacagcgtttacttgttcgatagcgttcatacttcatttccttgtttgtaataaaccgatttacgagaatgtggaagacatgacatatcacggacggggaagatcccgtccgcgtatgctgttatcacctgtggtcttgcccgagtgggcatctcagcttcagctttcatggttacaggcagcacgcctttactgagaatatcatcaacgagttgattccaggcggtattgatcattggtactttacctgctcacgataatcgcgatcagccagagccaggagcgaccaaggcgaggacacaggaagctcacggcagccagtcgaggcaaattggaccgtgtaaccagctacccgctcggcaacaatgtcgatgcgccaatcgatttcatgaatctgtttgatgggttttgcctttacaagatcatagacaaccccttgcggagtaatcccgatgactgtaactttactacccgctcgtttagcgatctcaatcatatccttttcggtaaggacacgactgcgacggacgatatgttgtagataacgacgagtattgcgaagcgcattatgttcacccaggaaatggaattcacggatggacagatactcattgttatcggtgtggatcctaacaggccggtaagagtcattcttcttaataccgagcgaaccagtttcgatctcggacatctggaagtagtctacattcttgtgatgcagaatatacaattcaccggttggagccagataaatcttctgactgttagtaacatccacttcaaccgagttcaattcagcatagatacccatctcctgaagaactgcctgcgcacggacaagcttatgtccagttataagaggggagatacagatatttgaacagtacaccacaccagtaagaagattttcgccattacagggaagaatctccagtccgggaatatctgcttctttcagagcacgctctaccttctctttatcgaagagatcataaatacctacaaacctagccatttcgcattttcctcttttggttaaagtaattacatacaacgggggtggggagtgtattcttactcggtacagctactcttgaggtagctgctatccgaggaactattatgctggattgtattgggagtttaatactcatttcggatgtacctaaaggtagtgtatattaaaagaagaataatgaggggtaatctccccctcattagatcaaggtgatccagtataaaattcctaatcttttttagataaggttattgctccaggtgaaaccatcaggagcattcttactaaagaactcattaccccaaccaaaagaaatcttaaagtctttaactacacctgaatcggagttaataactttatattcactgacctcatcgctattctgcaatacaatcaacagagcgataagatcttcaggattgccaatacagagctcatgacgcttgtcatgtctcttaaagataactgtcagcatatcaaacctcatgacggaataaagagagctccgaagagctctcagaatttatacatcaatacgtctttcggatatcgacgcagaagaaccttgaaatcggtatccatgggcgcagtagtcgaggtaacaactttacccttcataacttcacgaaggtctacctcttcaactgtgacgttgtgaatagtcttccgagtagtccactcagtatcaatgttgttatacggattattattcttctgccatccatctgaatcgcggaagggaatagtgtaaacataaatcgtcaacttgaggaattcttcaagtgtgattaatcgatcggagaagatccatatgtcaccattgatctcaacgaagcgatcagagttaaactctttttctacagcgctacctattccaagtagttcagcttctcgtttgacagaggtagcgtaaagatttaggttagactcaaccccatcccacactgttaacttaccggaccttttaaagcccggcatgagttccttctgtttgtagagagagccatgatacaacagctctggtttgtccatgatgcgtttctcttgataaactcatacgatggatgccttttacaacatccatcgtctatgagccttacacggccttgtagctatcgtccatatcgataggacttccagaataaatctggaatctattgaacagactgtccatgtctacacgtagagcacggatattcatgcgattatcactcggccgcccttcggactcccaaatggcatgggcgatcgaaggagctacgttattcagatagtcttcgacctcatgctcatcgagtaacaaggtatcttggaatccgatacgggaaataatagcatagtctcgttgatcatgctttttggaaccctcccgtaccagataacttacaccggacccattgctgcaaccactaccgtgaatctctacaacgatcttaccgtgccatttgtagtccatgggaagtactccgttatttaatccgtttcattacaagaggaaccgacaaagtaatcccattcgacagtttctccagaatacgatttactgctgctgcctcttgcgcattctcacacgggagcataatagcatccccgtagtaatggctgtgatccagacgatcaccccagacactgtttacgaaaccatattccatgccgtcgttcgtagttacaatcgcaatgacatggtcaggaccaatcataccagtttcgagatcaccgaccagatccagcttctgtacaacgcctcgctggcagatccatacctcatgataacgatagggagtaaggtcaccaccagtgctcggatcgacttcgctaacgaagtacagagtaccccagttcatgctttgaaactgaacggtctgtttgtaagcttcccatttgtcttcaagacagtttacatgtttgtcgatccacaaaccctcgttattgaggctatcgacgataccgtcccggacacgtacgacatgaagagtcttagtcattttcaatctccttttaatagtttctgaatcggtcgtaagtgactttttctttaagccgatcgatgatgtaattacgaccttgagtgaactgaagtttttgatggccgtccatctcgctccattcggtcaagcgaggaagatctgaaacctgatcatatttcgccttattgagcttcttgatcatgtcccaaatatagtcaccttcgatgaaccagcggaaactagtgaatgtatcaacgtcagttagcttgaccccatagaggctaagatcaactcctgcctcttctgccatcttacatgtcttttgataggcatcgaataccgcacgaaggcgatggtcgaaaccatcaccctcgcacatttcgatagctacgatcaacatcggaaacgtatcactgtagaacttgatcagcttccgggtcgctgcttccagcgctttctgcttttgcgtttttgccattttcaatatccctaaattcacggaggagttctttgtgttcatcgtaatgtttaaaagccagtgcaagcacattaagtgccttcccgaaagcgcgtcgttcactgacgggatattctgaccagattttaaacttgttctttggtagttgaaagttcagatgtacgatcgtgtcccaataggaatacgaaagcaaccagctcgcatgttcatagacagtgtggttagcagggtctacacccatcacatccatgtagatgccgttttctttcgccacgcacagaagattcctgtgacaatggagaaggtcagtcatcacatctacgtctggtatgcctttaccagaataagaatggaacttacgaaccattaccatccaggcctcgaatgctcttttaaatgcagcagtctgccgacgcgtcttcgttgatttcttagtctccatcatgatgctccactcgaccagaaaggttatattcgaccttgaactgcattcttaccggagcgtaagtttgcggatattctggaatacttttgtattcaccttcaaaacaggtgaacaacatttcacccgtactgactttgtagatacttggcatgtagtgtacgtaccacagcttgtcatcttttagaacataatgaccaaaactgttttcacgacgagcatcttttatgacctggatattcttaccaagtacgtctccgatgaaaccgaggtgatcatccagatccataccctcggaatcaccattcatgactaaagcttcaggagacaaatacatctttcgaatggtggcattaaccggttcgagataacctttctctacacccgacatccatttgttgaaagaaccaatccgcttgggatcgtctgtacctaccaggatagtggtatcgtcataaacgatattaatcaaatcgtagccagctgcacgattacgttgaatgatccaaccatgatagttgacccgcagaaaagccattgcatgtagtttgcctcggagggcttccagagtaagctttttcattttagttccttagtaaacgccattgatgatggcctcgcggaaacgagcccactcagtttgaccaactaccagctctctttcttttggacgccagaggtggtcgccgcaatcaagacctaggtaaagcatattagctttccattggttccgatggttacgcagtgtagccgacagactgaactcacgcataacttcattaacatccaaatgaaccagagtttcactggtcattccgctcatgctgataccaagaacctcacgaacacgaatcagatcatccgtcatcgaacgccaggcttggatatgtgcgtaatactcatctggagtcatgctgtttttatagttcgatgctccgggcgtcatggacatccaactcggaaattggatagacatgtagtaaagccagtcgctatcgtatcgcagttcgttcagtttttcctggataatggggttggtggttgctttagccattagactactacctcgcgtagataagcaatgagttcctcctggaactcagcccagacagatttcatatcaaccccttcaggttgacgtgcacgccatacatcggagtctgccggtagttccagcgctttacagatatcacgccattggtgaacatacttacggacaccagccggagtggaaagaaccaccagagaatcgatggtagccaatttaacgaaaggttcgtcttcaatcggcataccaccccaactgacatcaatctcacgaacgatgtcattcagttcagccaggcgatgatggaactcgacaacaccttcacgaccaggtttgtagttcagaccagacggcatggtacgcatcatggccgggaacagttcggtcagcacagcgtagtaacgctcgtccttggccagatcacggagtttgttttcgagcatggaattaactttaggcatttctatttcctcagggcttgatggaattaagcagttgtaactttaggttggacgggtttgataatttcgttataggacatccagttttaggtggtgaagaacttcggatgacttactttcaaccatttaacgaacttattcagttcttcttcccgaacgaaaccattaccgtaaagatcacggcggcacggatcaccttcgggcatttcagcgcagtgggcgtcatgcatttgtcggatcaactccaacaaattttctttacgtccaatcaggaacgtaaatacatgcagcggatcccaacttgtcatggtggtccacatggatttgttggcagtcagatttttgagcttgagctctttcaccttatccatcaccaatttgcattggaccaacatcccttcaagttgttcgttcggatcaccgtcaataatccagtgagaaccgccaggcatataaccgcagaaggtgtaaagattgtcacgcagatacgcatgacgaccacgttccaatgcttctgctttcttctgttccttagacttagccattttcataaccctcatcagacttgaatgtgcgttcaggactgaacacgtatttgatatcgtcaatcacagctgtgatatagacctgatattcttttgaaatagattccatcaactctaccgatacgtactccgcagtttgaatacggttgtaagcatcgtcaagcatgtcatcatcatgaccgaacaacaaaccgagatcagtagaattgattaccgggtaatgtacccagttacggatatacggtttaccaagatgaattacttgaataacttcatcatgttcctgtttctttttcttgtttacgtatttgacgtgacgttcgatgaaagcatagataccggaaccattggtgttaccgtatgcagccagttcgaagccgtatttatggtcgatgttattggtgtcacgacgccattgaggaatgaaagcactcatttgaattcgtaccatccgttaatgatcagatcaagatccttccagaacaactgagagaattcatcgaaggtatctgcgttctccagtccatcgagatcaacgtcaggagacttaacgaaactcataccagtttcgggatagatatctgtgatgaccctagtactgttgtcagagtaatcacgggtgaatgtggttaccgaatggtcagtaaaaagagcgacacagatatcacctttatgattccccagttcatcggtaagagcatcgatgatatcgacatcgatgatatttccaccaaagtcaagaatttttagacgattacggacaagttcatttgctgcccaatcgccagactggataaccaaaagcttcgcggtttcaccgcgataggttacaagatcttcctcgccttctcgccgcataccccagtcgaaacggatgtccgtatcttcattggctttatcacgtgcgatgattacaccctgcttaccataaactacgatatgtttcatttgtatattccttttggttaattgaaacggctatattcaacccaccattcttcgtcgcgaatgtggagagtagtgcacaggtcgatgattgcatcgaaaagcagaacagtcgttggattgcgtccaatgaactgacgttggaaagaagtgaagatagcgatgatgttatcgccgtcttctgtgtcaaacaagatctgatcatgaacaagagacatgtcatagaaatcaatcttagacaatgcctctagaagaacttccatgcgagtgagggcggtattcagttcgaatacaatcagcggactgcaaccacgctccttatggtgatgcatgcgatgtttggagatacgttcgacgataagccggggaagaccttgtacatctacgagtttacgtttcatttttgattttcctctttacgaaatagaagccctcccgaaggagggcaattatgttgttacaggttgataacggttacgaactcgaatacacgacagagttcttcgtcacggtaagcttgacggaatggtttaccttctttaccacaatacgggaagaacagtttgcgatgctccgtatcgccaaaccagaaggtagtggtattggaatcgatgatcccgtgtgtagccacatcccgaatgttctggaatacgtggaccactttgtcggcgataacgcgaagttccacaccatgctcggtcatcatggccagaatgtcttcacgactgtagtcggtccgttcgttgttggtcatgatctcgtgaaccagagaacgcttctctttgtcaccgaagcagatgcataccagatgaacagaagcaccttcgatcttcatgccattgataggtttgaacagaacaatgttctcgtatttgaaatcgttggtgacgatcaataccgaactatcacgtacagcgatacccaggctataggccatgacttattcctctttagcgattgaaatagttgtacttgccgcaatctcatgatcgcggagatacacaagtttaactttgtaattacccggagtttcacccattgccaggatcaacttaggtaggtcaggttgagtggttacatgtgccagcataagctgagctgttttgaagtctttccaccggaccaactcctcattaacataagaagtgacccattcagcaatcttctcaccgcgctttcgaacgaaccacaaaagatcccgaccatcttcggtcgagaccttcatgtagtacggcgattgaacggggagcatcaggttacgaatattattcgctcccgatgtatcccagttaaataccatgcttacctcacagacttggtagagggaacgccggatttacacggatatcagtttcagtgacatacacgtaattgatggtggtttcatctcgacgaataccatacatcaatggagcttttgccggatcgactaccatgattcgacccggttgatctgcttccatatagatctcacctttggcattctttacctgattattggtgagaatgaacgtaccacatttgaatttcttttccatgtttacctcaattcaaccaacggttatcggtatcagcgaaacgtgcagatgcacgatgcgggtaaccgtaagggatttgcgggaggataggttgatcgatgagattagaaggataaccttcttcatcagggaaatacccatccagggagtaaatcaattgcactacacgtacacggtcggagttcggtccgtaaaaacggccgcagttcaaaccaactccatgcatgaactgttcggagtcaataggaatgaaccgatagtagtagcgaagatttttggtcgacaacagcttttcgttcagatagtctgcccagtctccagcgttgtacagatcccgttcctcaatatcgacagtatctgcggctacagcagctgcacggaaaatgtcacgcacgtagtctttttcagtaagacccatggtaacaaattcaggtaacccggttcgaccaagaccaatggtgaaacgtgcttgcggcagttcgtcagcacgacgcgtataaataacgtagtcattaccttcgaattgattaacaatcgccttctggatatctgctaccttttgttcgagtacatgcgacatctcgaatacagggttgttcggttgaatggccataccagatacagttcctgcaacatcaactacattagacatgttcgctcctaagggaataaagaggacccgaaggtcctcaattgagtaacagatagctatactgcgtttcttttagggcgatccgaatgcgaccttcgatttgtttggcttctgcttgacttgcaggaaactccaacaattccagatcgctgttttctggatcaccttccatcaatcgattcatcttaggccaagggctagcttgtcctttaatgcgtgcgatcaattggtctacatctttagagactgttttacttcgccccatgacgaacttaccggtcccaagatggacaatgcagtacaacccattcgttacaacatctttacgtttccccctaccccagatagtcgaagaccatttgttgtattgggtttcaccatggaatgcctgttgcatttcaaaatccttgctaaatgactattacatttagcagcccagtattacttgtggtattctgggaagagcagacgggattcttctcggtatgtaacaacaagcgattccagcttactgagaatctcagccatgttgagatacgcatctcggctagctttatgttgttcatacataggatcgaatacaccaatcgattccatttcggagtcgagttgaatggctttgtccaatgcctcgtcagaaatcataaagatctgacgaccttccatcgccaccttcaattgcatttcgaggatacggttgtaacctttgcggaagaactcggggctaccatcatatcctcgtgcaacagcacggcggaaaagttcaggatcgactgggatatcagtagctaccccattatgaggtccgaccacgaatcgacgtccgcagctatctacaccgataaacagtgtagtgccttccatttctttttcgagggtaagtacccagccaggatgataggttacattcggattatcctgcgtgcgcagtgtggtggttgtatagaactgatcacctactttcattttcgaatcctctattaatgaatgacaatctgactacgggaggcatagaacgatacagcttcaggatcactcgatagaacaacctcgtaagtgtccccgcttaccttacgaatgatcttgagttcatcacctttatttgccattattaaaccaggcccactatcactaacgttggcagtgatgttttccagagcagtagctttaacactcatggtttattcctcttgatcgagataactatgtttatttgccatagtcgttgaatgtatcttccatctcactaaatgggatggtttcaatctgattgaaattatcatggttgattacccggaaaccaccagctggattatctacatcctcacaaatgatttcaaggtcatcaccttcattggcatactttgtttcggtataacctttttctctatcagtacgggtaataaagatatccctggccgcctgcaataccatgcctttaacgacatcgttctttgccaggttagcactaagtttcattgtatcactaatgagagtactgaagttcatttctttttacctttcgctttatctgtcactacatctttacgctctctccatttttggtcgagtatcgtgttgatgatatatttttgtttacttgttgtaacttgttgcattttacaccgttgaagcaattacagcgacagagattagttcacgttggaaacgatttgcatcgggccaattcagagtgtgatttgcatgtgcattgatctcacccgtggaacgatcaacccaaacagtgaggtaacggcgatcccgtccctcgaagatacagtttacaacaaacagacgttcatcgtttgcgttatccctcagttcagctttgaagtcgaaacgattgttgaaagcatcaacgatagcattcgttgcagcttcggtcgttacaccagccttatgttgttgatcgtaataaatacgcatgacgctagttacagccgcattacgtgattcacggatcagtatatctttcattacatgttccccggttgaccaagcttgtaatataggcttttaaaacaattgaatgtaacgacataatgctctccccgaaggaagagctctatgttaagccaccagagagaacttaactccgataatcggagattcccgatcgatcttgatcacagcacgaccagtaacaccatcgacttcgaaggtagttccccaccgcagtccatccatcttggataccataccaaaacggaaaaggccatcgcgacgaatttcgataggatcgtgttcggtgactttgtggaatagaatattatcacccgaatcaacgtaggcgacttcttcaatcttcagtttacgaatgtcttcatcaccaccgcagagtgcaaagatattgaacgtggaatccaccttcacataactagacagaaccgaaccaacaccttctatatcaacccgataaacaggcatacgtaaatgttgtgcgaagtgcttatcgctcttacccatttggtaaagcggtacacggatagaactagagactttctcagtcatcagtattctccaaatttgaaattgaagctaatgggtttatcagatcgcgttctaatgactcgaacaaattcattcaatgaagtttcaatgacataatagaacgaggactgatatatcaaatcttccctatagcgttgatctagtataaccatgtcattagaaagatagacataaaatgtcgaatctaagctatcgaccacaacaggattcgaacagaccggagtcgtttttataccgtcatgtgagtatcctactacttctatattcacgcgcttattattcactacaagaggacgatgaataataatcattacccaagctagtagtaatgcagtcatgaataatagaaaagataactcaatgagagttttatccatacggaatctccgtgttagattgtcctccaatcaataacgttattgttacccttcaaatcgaattcctcgaatttataagcaccaccgcctcttaaccagacttggtgatatttgaagtacagggtatcagcatcgttggagattaaatctatctccagattggtaaggtttttgtggtaggtcacttcaccatttctaactacaacatagaactggttcctaccatcacgcagcccatagcaattacctttatttttaattggtattttgcgactcactgcacctcggacatgtagtacatttacgacaaaatgtttcctgatcctaaatacaaaacgaacgactgtataagcaagtgcaattacagcaactatgatgcataagttaaccagtgtttcaataaacattgataacctcattgaatattaagttggcgtgcaagaccatggttagatgggatttcaaccacatcaagatcaatgttgtctttcactcgataaacccgttctagaacaccactcatattacattcgaaacgaagacccgagtcaggatgaattcctagtgacacccaactggtatcatcatccagcgaaaacgtaaacttgttttgagtttccattttctgtaccagccattcgccttcgttttttaccagtttgatgttagaattcatgtctattctccgggtaattttacgaccttataaacagactgaccattgtcatgtgtctcattagtcgtatgttcatctaaatagagataagctatctgcacagctttgctaatggtatcggcccagatgcacaaggttttagttcgatatgtttgtttttcccacgagtactttttaggttctttgtaggtaagctcgatgctaagcgatacgaattgcttcgtagccttagcggattcaaacatagtcttctggtcttcatcagacaccaagagtttattggcatcgatgaaggatccataatagcaactacggccacatagcatttgtgtcagagtggcctttccattataatggcgaggctctatctctacacgccaactccagtccaatagcttctttatcttttcatcgagttcagtcattatggcatctcaaattgaatggtgaccatagatttttcagggttgtattcgatgtaggggttgacataacccaaacggaaaagccattgccggagttcttgatagtctgccatgttccacggcatactacccatactgacgcgatagaccagacctttagtgtggtcatcgagtttccagttctccggttccaatacaccagaccgaataataatgcgcgtttgatcaacgacattgaacatttctggattagcttcgcgtaccttacggaatgcttcagaagccttactcgtgttgtcgaagagagacaacgactcggggagtgaaccccaaccttgtttaacttgcattttcaagaccctaaagaaaaatgtatagaaaggggacccgaaggtcccctgtcattagttcagagaagtgcgatgagcgtactcgaaggtatcgacaccatcaaccatgttgaacacagcgatgatcgcgctcatgggtttcttgcccatgttgaagtgcacgatgaagctgtctttgtaacactcgatggaacggatgccataaacaacattgatgcgatcgatttggttacgaataaccagcgcttcctcatcggtcatattttcgatgtagttctcgatcagctggaacacccgctcatcgcccaggatcagatttttacgttcgacttccaccggagcgaaggtcagtaggtgaggcatgaattccggaagagcctccacgttgaacaacagcttgtcgtccatcagaggagttgcacgatacagatccgacaggacgatattaccacccacgatctcgattttgttttcttgagccagagtggaagcgaggcggcgatcagcagtattattagaaccgaacattacattttcctttttagttaatcagtagattgggattccgggttagacttcccaggtgtctttccagcgagttacaggaagttggaacatctcacagagtttagttactgcacgatgttccaggttattttctggatggaatgtgatggggctcatcgaacaaccccagtcaacacgacagccagtttctttatggatttcactgagagcggtataagaaccactgccatcatcgtaacccattttgtacgggttaacgcagatctgggtattacgcttcatcagaaccttatcaacttcaatcgacaagagtcggacgaattcgttggttttctcgatgtcatcaacccagaattccagaaggatccattttccacgtgggtcattatgaccgccttggaagaatacactgaaaccttgttttgcttgatagaacggagaggacatcaggttacatgtaacaacccgatgaacagcttcccatacacgctcggtgacatagtcaccatagagttcaatgcatggaccacgaccagggaaactttccttttcagcgaatttgagttcgaacatgttattctcccgagcgatagcggttgtaacgaacccagtttccatcacccggccgctggaattcaatggtatccatcatgtggtaaccgaagtgttcaatgatccacagagctacttgcttggaacgcttcatgcccatttcacaatggacaacgatattttcgccattacaggctttcacccattcgacgagctctgcattacggctattgatgggattatcgaatccatcaatctcgaagacattgacaccgtcatcgataccgtaattatcagcacggttgtattcgatactgatcagattggtaccgggattaacggcacacccaacaccacgtggaacatagataacgcctttacgcttacgagtaacctttacagatacgatactcatttggaatcaacctcgcgcagtgcttgaatcagtttttctttggcttctacgctggaactccagcattcgatcacgtcgtagccgtgcccatctttcttcatgaaagcacgtgcatcatgtccgagtttaccagccacatgcatgttgtaagcctggaagcgctcgggtgtcatggtaaccggatccagatggatgatggtaaccatatcgttcaggatgttgtaagtcagcattttgaattttccttttaaatattagtggtgtagtggcgaacgacactatgtgtacgctctgcggtttttcggagaacactgaagttaacgacatcatgatcgttgaaaactccagttttgatgatttcggttacggacgccatctcgcatgcgagtccaaggcgagcgataatcatgtcagcatgtccaagattattgaagttacatgccttgctgatatccgatgtgaagtgaagagaattgggatcatctccaacagtgagaaacacaaatttgttcccagccgagatctcgatgataagttcatcatcaccgtttttgtcttccagtagctcataaagctcatggtatttgatgcacccttgtacccgcccgagttcgatctcggtgttaccataccaggtagctttagcgagttgcatgaaattcatcgcggaatagaaatccacgaacacagcaccgtaacgacgaacatcgtctacatcgaaatctttagctagttgattatggacgatgaacacaggtacgttaaaaatgaaatcaacgtacaggtgaagctcacatgcagacggaataccgtcgatggtattactcagaatttcttttcgcaattgtttcattgtactatcctttttacatggtggaatatcacatttgtaatatagggatttaaaaggtttaaatataaccttctattatcacagttgtaatataggcttttaatgcgtttaaatataaaagaaaaaaaggacataacgcctctcccgaaggagaggcaattatgtttactcaccaacgtcgggttcggtttcgccgccagtctccggaggagtaccgccagtgccaccattctcaccttcgttatcgccgccttcacccggttcaggttctaccggagcttccggttgttcttcaacatagaagctaacgaacatctcatttccattcttgatttcaacggaaacggatttccaaccggcatcttcaatcgctttctttagagcagcaacggaagtttcagcaatggtgacattacggaaatgacggtgaacgaaatggacagcttgttccggatcgttaaggaaatcaacagtcccaggaagagacagatattcgttgatagcatcttcgtactgagcaatctcagcatcggacatagccttgccggcttcgtccagggaataaatcgccattgggtgattctccatagtcatgaacagcggtattgctgtacataacatcggtcacttcatagcgataataccaaagccaagttcagtccgtacaccggtttgcccctctgtaacctgctctactttaacactccattcaggatcgccaaccaaagtaacttctagaatagaatgcgtatcttcccctgccattcggtatgccgattcaagagattggtatacttcaattgttctatcctgacagcaaagaaacacagtgccttgggtatctggaaagtctagatacattcgacggaagtctgaataagcaataagattactaccaacgtagtgtgtcatactaccaataatgacacgtcgcttttctttcttttttggtttctctttcttacttgtttcagatggcaatgttaaccaaattaaaccagctagaattaaaagaataatagctgatgtcggtatagtaaatggcatacctttcacctaaaaattaaacgtcaaaaaagctgtccccgtagggacagccttatgtcagatcagttgttgacagtggcccagtaggatgctgccagatcaatctccagagtattaggagcgacttcaacagtctgagattcaccactctcattaacgatgaactttggtaccagatggaaatcattctggataccagccatggtaccagcgatagctcgatcgataaacgtcgaatgcaccttgactgcttcagcttcaacatcgagacctttaagaagatctgctttaagatcctcgcaatacttcagtacagaagcaccagcattggtcagagatgcatgttgttcaattacgttttctacaggttccattttcatatccttaattagagagaaggtatagctgcgcaccctaagatgcgcagattaaattacttgctgaatacacgattgctcatgccagtgctgttcagtgcttcatacggaacgaagatggacgagccggagttacccagactgttagccattttctcttggacttccagagcacgatattgcagaagcttctcgctgatacccgcagcaacgatttggttctgatcacgcagggtacgtgctttagtcagctcaacctcacgatcagcttcggccagtttcaaggcgttagtgcgtttggtcatttcaatcgcttgctggttattctcggtctgaatagcaagttcacgctcagcttgtttctcaatagcttcagtaataacactcggatacttcagactaccgagagtaacgttagatacttcaagcggagaatttttcattgcttcttggagtttggccagaagatcagcagtgatcttatcgaagtttgcaggaacttcttcgactttatatttgccgagcacagaacgagaaaccgagctaactacatcacgcccgtagatactgtaaacttgatccagggtaacgatgttgtcaacaacggtgatcgagttgaacatggcgttgataacttgttcgttaccagcaacgcgagtacggaaactaacagtaaaagtcagatcgagtttatctgccatctttacagtcagttgttcgtttttggtctgaaccgaaccatccagcagaatgagttgatcacgtccatagacagtgagtttaccgggttcgagaacttccggggaatagccgttaacagtgagtagcttacctttatgtgccggaggaataacctcgaacgaacagccggtaacagcgagagcgatcagaattgcaaaaacaaattggacgtactttttcattgcgcgttttcctgtttagatttcttgagttgttcgtcaaaagaagattgagctttcgacacattatcttggggtttggtaactttttccgggatagttgattgatcaaccagcggtgcatcgaatcgagttaccgctgattgtttcaccggagtggtaatttgaagcagcgacaactggaagaagattacgatgaccaaagcgatgaggaagcgttttgcaaaaccaagttgttttacccagttctttttagagaacagaatccatcccgccagaccaatcgaaatcagtgtgaggattccatagaggaatggactaccaataataacgatgtttagattatgcatacttacctcattgattaacgtgtttgaaatattgatctgctaaggtattgttattatcagaaataagcctaacaccaacagcgcgatcagttacagatttactccgcttgagcttagagtcataatacctggagcaacgatagttacctgaactcaggaaccgaagggccagaaggataccttctttaattccttcatcgaacgcgtcttgttgtgcagcgtccgtgtaacggagcacattttctcgactgaacgtttcatgagtttctgaaaactcttggaggaataagtcatttgctcttaaccactcttttgtaggtttaaagggacaatcatctttcgtatcagtcacgtgttaactccctcaaaaagagattgcgtgagatcaggataccacggcgtactagtgaggcggattttaccctcttcatcgtacacatcactaccgacgatcatgatttgaccatgagtctgaatagcatcgatagtagccaaagcagcttttcttgcagtatcagtgaagagtttagacatcattcgtccttcgccgttatatgaaatatcagcgaaaccttcattgatgatgccatctacccgttcgcgaatttcatcttgtaggaattttgttttcccgctctgaaattcgttatcatggtaggggtattctactttcgcttcttccatacattcacctcggttatggaactacgcttcattcgccgccttagcgatgatgctgctttctctgttgtctcggtccaaccaccaccgaagatgatgtgatcgccgttgatctgtgtatgtagttcatgtgtagccattacgccactaagaccacgagatgcgtaatactcgataagagcgttagccggatcactcatgtgttaaccctgtcgtagtgataggagtagatggaacccacaacgtgactagcagctgaagtatccagagaatggttctccaccattttcacagcggagaggttaatgtcaccgagcttgtaagcaaagtcagtgagccattcacggacaggtccttcagctatacccgtcttgtcaaccacgtcaaccgttgctttatccagaagatcatttaacattgcaacaccgacattgataatggatttctcaaggtcgataacaacggcagaaaactccccactcactcggagcaaggagtcaaggtctggatcgttccaatctaacgaaggaaccttcatcaggtattcacggactcgaagtaggtttccgagagcccggagacacaagtgagattcacaccagggtcttcatcgtggtcggtagacccagtgatgatatcctcgtaatggttttcaacagcgtcgagaacaccacccaccgcatagtcaatagcggcagcagctgccccgcaaagaacatcattgccgtcgttggtgtcatctttactgagttcacgaactttgttcttgaacagttcaattgcctcagtacgtacttctacagcagcgccaatcagttgagtagccattaagcttctcctacaagttgtttggttttaagacgtagtttgtgttgccggtatttcagaatggacgatgctttaacttcacccctcagaatgcgtttagtttcttcagtcgtaaagtcagcatcgacttggtagatgtaatgcttctcgtagaaatgttggtatccatggaaaccataataaccacgtagaagttttggaccagtcaatcgtcgtagctctttcaccatacctgaaccgacgccttttcgccggaattcgggtttaacgtagaacatacagagattacgacggccagtattgtgcaagatataaccaaccagtgcaccatcagtatcatcgatcgccattaccacacggtaacgtctcacggtaccatttttcagaatggttttgatataacgacagagtgaaccggattgttcgtaaagtttgttctctatgatcgaacgtagggacatcttcacaagaatgggagcttcgatgatactgtagttcattagctgtttaccaatttgaaataatcaactaccccatcggaaatatcgattgcttccacatcttcagatgcgaaaggaatccagtttccacctgcttcaatagcttcggctttttcttcttcacccaccttaggaatgagtgaaaaaccgggacagtcgggatggttaccttcaatcacaccgagtacaccggagacaatatcatccgccatggcagcattcggattgacatatgcctcatacttaccttgttcagcttcagcgagaatttcatctcgtttactattcaccgcgtctataaacagatcacgtacttcactgaacgtggctgcgcgcggttcaccagtgccttcgaaatatacggtcatggtttttcgatcgctttgttgagttcttgttctagttgcacgagttcttcatcggtgagatcccttgaagcacacatgcaacgccctggtcgtttgtaccacgtgatacagacatcacgccaaatcaaagcaccctcatcttcacctggaatcctgaatgtttcaagttcatcggtgttaagagtgggaccacccggataagggttaactcgatcgtggtctattttactaaacttcatcaggaggtcgtaaagaggaccggtagatacgagtttccaatgtgaagcaagtttgatgtcttcactcggtatagtcgcccagtattctttttcattttcatcaaggtcttctggctcaggcagaccaccgattaaacaataggcatgtttagccacttctactaaacgggtgtttttcatagcttgatcctgatctttgtaataccgcaactatgttcgcagaactctaccttcgtccatcctgcttctttcaaccgcgctttaacaactttctttacagacaaagcaatgtcgtctttatgttcgacaacaatctcatagtttctgacataatggaagttattgaaaccaggtagatcttcaaggatctttttacggatgcttgcacagacttcattagcctggcgttctaccagcatcgcaataacttcactttttgtcggaatagaacaattgtcggtttccatccggagagttttgattgcatcttccagaagcgattttgaaataccaagggtcatcggacaagctctccatgagtgagatagattttaatacgggtcacaattgactcacctgtttcattagtagggctagcctcatcaatgatttcaattgaccaaccatgcttacccattgcttctcttagagagagttttaactcttttgtgagtatgtgggatacatgtatttcgaaccaggctgctccagacgaatcatattttacgttcgcgtaatttccaccataatcatccaattccatttcagaacggatatcccgaagaatttgagttgtcatgtagcgaacatatttgtcatagaactcttctttagaatctatgacaatggttctatctcgaagcataaaagataactcttttttatttagtgacgtgacatttgagtcattcaccgaagcggacttgcttgagaagttccaaggtagccaattccaacagctcatcttcttcaacctcgatgtctctcagtaagtacatcccttcccattcaaaacaccggtctttaagagcggcattaatattacttgggatcatcaggtaaacatcatactcttcaccttcatcgtccaactggccgagattatgcatggtgatactacctgttttaggaacaggtgtcattcgatgaatacctggtttatttgttaccttgataaaggtttcaatgtcatgcgtaaatgacattgagttattaatagccttatcgagaacagtatcatcagtcagattaatcagactgaattgaccaccagggatataacgagtacaatttgaattgcaatacgtctgaacaagcggaacgacagcgagttcccagccggtctcattatctggatccggcatccatgtaccgtggattattgcgatcttgttagccaattacaccacccctcaaaggttctggatctcggaatgtaatttttacagtgggaagtaattcaccagaacgttcttcccaacctatctcaagactggtgatacgttttgcgatatctgggtttgtagcgataaccgatttaccaccatttacaagtacttgaagacgatcagcggaacgactggacatgtgtaactacctcttgacaagaaaggggatattttttacattgctcaacttgacgttcagcgtgtttcttcgtgtagatacaggcaataatgaaaaagacgactagtccaattatcattaaccagatagactgtttcctcttatacgtcatttgtaaagtccttatggattcagcaaatacgtaatatagatctgaaaaaaattttagtacatacagccctctcccgaaggagagggcatatgcatttatttcttatctgctggattaggtacagtaaacggtttaggatcaaaactcttactcatcctgcatgcagagaaaagcctttccgcagcacgatcagtagcggtcattccattaaagccgttaggaccaaactgtttcctataccgagtgatatcgacatggaagttaacgatcttatctttgatataccacagcgcagtaagattcgcggtgatttcgtactccatggttttaggcatatcttttgctttgttccagagagtccagtacgcattctgaacggcaatagaagcctgatcggaattggcgtttttctcttcgatctgattacctacaacaatactggtttgatataccagtgcgcaaacgtcatcgttcaacgcaaggtaattattcgcattaacagcgaaagagaagaacataagaacgaaagcagctacgtatttcatgggatctccttaatttagagggcgcgtccattgatgggacgaaggtattcgaacttagtaccgatggcttccttacaatcgagataagtggcaccaccgataaagtcaggatactgactgagattaccttttaggttaagccaattaaggcggtaggttttactataaaggttattatgcagggttggtgaataaactgcaatgtagtggaatactgcccaactggtcggatcttttgtttcgttgttcaaaagagcggtaacgacctgttgcgagagatcacgaacacttacattacttttcatgttgtcaatagcgagagcagttgcgatgatctcaactttttcacaaagctctacatcgaccacacgggtatcccgcatgaaacctttaggcggcggtgcagcattggctacactcaacaccatcagcattacaaaacctacaataagacggacgaacatattcatttactccctgcgaatttgtaacccacgttagcttcacaactttcgattatcgcctggataatatctttatcaggaaaacgtttagttatgttgcgtttaatatctattacaagaacttgtgcatagatggccccagtacgaatatcatcgttatcggtgtcacccatatgcttattcaaataagacattgcttggaactggtcgccgccattccgaaagatcttgataacatcgcgggacatagatacagcgatcttacaggatttttcggttatctgttgatcacgttcagcgaacgatggttggcaaccagtaaacatcatgatcagaaaagcgattatatagcgtttcatctccttaacctcttttgagtatatgtcaagtttgttatgtagtgattcaaatgttttaaatgtaatatccatccaacataaagtcctccccgaagggaggactatgtttagatagcatacgactctacaattggaccaaccagatagccaatccatatagcgaatacgcatggcatcaaaaagttatgtccaattacccaacgtttataccacacgggtgaccatttgaaaatatctttccaaataccacgtgcttccagttgtatataaaggtagaaccagatggatgtacctatgaacataactatcgctacactctcatgataagcagagatataggcggttactataccaactataaaagcaaggtagtatgacattaagcctccagtttagcaaatgcctcgtctaagaaaatcttgaatacatctcttactaccggatgagctttagtcattcgattatagaggtccaatttctctttgaggaagacgggagcaaacttaggagcatcatcaacgataacatacacgtttgtgagagattcaataagtttgcacgtctgtgtaacgtcacaacattcttctaattgccgatgatacgcatcgattcgaactttccgaggagcatcaaaattcggctgcgttaaaccttgtacaagtttggtgatatacggcgtgaaatgagttagaacgtcatcgagagtccagctactatcttcgacgatgtcatgtaaccacaaggcagcctgttcgccaggaccaagcccaaacattttaccgatggatgctgcattgtgtaaatgcgtccataccggtagcccagaacctttacgtcgttcaccagaaccgaccgtataacctacgccaatagctgctgctaactctactgtgtgatgccctttccatagcggaagcacgttcgacgggatgcgagtatccaagatagctttaacttgctgatatgcttctgctacaatatccatcatttactccacgttaagcgttagtactattgaggaaaaaggatcttctcgttaggatcaacaaagaatccacaattaacgagaattacgtccatccaagttttagtttggagaatacccgtttcatatgcatcttcaagatcgattagatcaagcggatcgaatgaaccataatagatcggaccatcatcaatctgcaattgatagaagcgaagtttggacatatcctcttcatctagagtatcatcgaggtcttcatcatcatcatcctcatcgtccacaccgctcattaaatcaagcacgtgttcacgataaaggaattgttgaccactttcaactgtgaaccaatgtttcttatctttgattggaatccggcgcttaaactgaggctcggcaacgaatgccctatattcctcttcaagctcgtccgctctaccgcaggccatggtagaagaacggatggctgtaagtacaaccgattccaaaataggatgtagttctatcatggacacctcctagtaatgggttaatgatcatctacatcatgtagatctgagataatctttaacggtaaagaaaaagacaaagtgccctctcccgaaggagagggctttatgcaccttaagcttttagtgcatcgcagttctgggctacgtagcgaagcacttcatgaagaagacttctcatccaaccctcagagcgacttccttgacgatatttcttaaagatcgtcaaatggttcatgcagtctatgtcgaattcatattcgatccaagaggtctctttatcacgaactgctgtaatgtgaacagtgaaacgttcaggggcctcagatttccaatcaattctaacgtcgacagtgtggttatctggaccagaaacgttattgaggatatacggaagcttctctggcgtaaccttatcgagaatgaatctgaacagtgcaatggagattgcgtcatgttcaagaagataaagttcattccgacggatacggtgaaattcttgatccattatcttttccttatcgagttacgtactctgcccatctcacaagaacctgtgcgctgtcacgatatagctcagcggattcgatgcagccgctactagcgtaatcgttaatgataaccccaccatcatgcacagtcacatcaaagtgaaggatacctgcaccagtacctactgcaatcgtccaagtttttacttcgggactgaagctggtgtcaccgattattacttgtgtcccatcgcagaagtgtatgtgttctttatccaagcaacttgggtgcgacatgaccgtatcggtcacaaccatgactattgttttcttccacagttcttgataacgcttatcggtatccataaaccaaatccttgtaatgagggttataagaaacagttagactttagttttaaccgtgatgggtttaccgtattggtcgaagttagaggaacagtatgcaactgcctccgtaaacaaactgttcacttcttccatatccgaaatgatgtcatcggaaactgtacctccaaccaattcaaaatctacgccacctggaacaccgtagctatattcctgtacgatattccacagtcgatcagatacctttacctcagcagtaacgtagctaagacggcgatcaacggagcgatgatggaaggtaacagtagcgtcacccacctcaacagtggggagggtattagcagcttcacgacggaaagcattattgtagtaaacaaagacagcttctgcaatgcgttgcagaatggtgatatgtacgctggtttggatctcggtattcatggaacattcctctatggactatcgatgatcttctttacgtatttgaatgatatctttacgaatatcaaattggtaatataggtttttaatgtatttaaatacaaaaaagaaaagaacaaaggggagccgaagctcccccattattcagatggaacgacgcaggatcgaatcgagattctgggtagattccaggaacaccgaacgcagatcgataccccagtcactaatggcttcagctgcctcaggccaatactctgtaccaagaggactcactgtggcgaaacgaggaccgtcgagatcacgtagagtgaacttgttagcatctatcagtttcaggtgttgtatcagaatgtggtaaatcacttgacacagaatcgacttaccacgatggttgccacccagcacggcgattcggagttctttactccagagcgggttgaacgcattatccacaggtggagacaccttagtgccacacggatgaatagcgtgctcactgacagtcagatgatagtcatcagctttgaactcactcaagattacagcggaatcgagatcagcatagtcttcacgaccagtgtgcattactttgtggttaagaccaagagaggtcaactcattagaaagcacattccggatagccaggctggttgcagggtcatcagtgagaacgaggatttgattatttacgtggttatacagcattttgtctttccttgtggtcattaaaagctttttcgtaaatgggagtaacgagatggttatcagggtagactgggtcaccactgccatcccgaacccaacggatgtaggttgtgaagttgaatcgattactgcgatgttgtgctgggtcttgtccgaatccgttatactcgggcatatttagccagaggttacagatctggaacaaccagtccaactccactggaatatcatcggtgatagttcttttgtcttcttcgttcagaatctggaacagttgtaaaaggaagtggatattgttccacaccttagccccgttcttgatgttctgatggaagtaaattgcacgccgagtaaagagattacggaagatctcaaactcgtccctcggtaaagtgattggctcattcagatagacaaagcgaacgtacgcttcaaccatctcaagagacatgtgatttttactggtcattgaaattcctggtggatataaggcccagccgaagctgggcctttatgttgtcagatccagtcttcctctttggtgatgataccatcgtattcatcagaagaaacgccttcaccaaaaccgacgtagtcttcccaagaatcagaaaccttcataatcgtctctcatagggctttcctaatgcgaatagaaagagtagtaccgtcgtcagccttgaacttgaacagtgcggttccaggttggagaatagaaggtacaacggtgacagtccatgtacgtgcttttttacgactgcgtacataatcattgatagcttcactcaactgttcggtccagtgatacttttcgaaatgtgcaattacctggagaatatactccttatctccaacaaaagtagctcgatcttttagatagttggggaaaccaacagtggcgatagcatgcagtcgttgacaagcagaaaggagcagactcataatgacctcgttaagtaagcgctaatgatttcgataccaatccaacatccagagagaaaggcgatgcagaaccatgtccacggcgatataccgtcaaacagattgaatcgttctctgggtacaaacttgacaccagatttcttctcattccaatctatgtttatcgtcgaatagactggatcgacactcactggaattggttctttcaatggaggtgggacaggaactaacgattcgatgtcgcgataaatatcacggacgtccgtagcattcattcgcggcttcgatggtttccttgtagtagtcggggtttcccatgatcgccttatatggttccttgacgtacgcagcgtagtattcttcctcataagctatcctcgtattaatatcgccattaagaagacgataaggttgcgcaccgatcttctctgcaaaggctctaacccgagcgacagttattgggtaagcatctagacgctttttatcaagagtatacaggacactgatatcgtaattgaagaagctgttatttagactaaccccttgttcaattgctttatcataagctgtctcaagatagtccagcttattgtttacaacacgcatccattgatcaatacggaaatcagcttctgcaatgagccgaggggttctttcgatgttccccttcgactcaaatgtgatagaatgactttccaaccatttcttggcatcgggaagacgatctgaaataacttgtggaccgagagcagaggtcgtacaaaattcagaaatgaattcgtcaagcagacctttttgtgtcagttgttcaagaattttcatttaaaccgttccaggaaagtccaacgttcatacgcgctatatacacgaagaccaggattagtaacaagttccagttgtccaccttctacataggggcgcatcgcaatttcgaaattctcttcgccaccacagttaagatctacgtcagattcgaacttaaagtcttctttaacaatggcaatgaccatgttatttttaagatcgctaccactataaacagggcgagggaaaagaacaatcatttcaccggctttatagtcaatcttaccagcagtcatggtttcaaacagaacttcagttcgatccttcagatcttccagcgtagtcggcagatttttaccacgaaggaatttcaatccgagatcatgacggtagacagtaactacgtcaggattaaaatcgagttcttctggagtggcatcttcatagcagagacgtttaaagtcttcagtaagaccacacttacggacgatgtcaaaaacgtcagttggttgtaggggagtctctttacgaggttccagcggagatacagtcaaatcgatttcttgagacattttcgtttcctgtttatagttaataacacattatcagttaactcggtattttctaattccgagaaaaaagttcacgccagcttcgtttccatttgtagttaggtgcgtatatactacagaaaccttcatctgccatgaagattggattaactcgttcaacgatttttacaattgcgtgagggctatcagaattagctagaatacattctctagcctctttcgtgtaagtgccccaatcatcaatgtaaccttccttcagctgatcaactcgaccaatccaacaccgaggtataaacagacaacggaaccaacccacgaatagaatatggatcaaccacattgacagaaggagagaacagaaatataacgctgtaaagaacgtgtgtccatcagatgcattagctgtggtgagttcttgccaaccacgtttaatccaactaatgggattccaccagacaatttctgttttaggttgactagcgtaacggtaaaatattgacatgtttatccctctacgtcaagaatagtttcccaggttttatccgtctgaagctggatctttatttgattgacatacatctgatccgagtattggcggaatatcgtcatccggattttctgccataatggcatataacgacgatagctgatggtgaagcgctgatttgggtcatacgcttcaatagctttcctgattgtctcagcaaagaaagcaaacgaatatacattgttgttatacagcaatgcagttatggttttcttagagccgacgaggtttaccttcatggaagatgtccattacgtcaagtgaagtactatactctacacgagcatatccaggttcttcgaaaataacaatattgaacttatcatcgcgccaagtaaacttgaagtaatttcgaataacgctgataaggtcttcttgaaaatccgggagattatattcagcccggataattcgacaaagtttccaaatagcattgtcaaacttgtagtaaacgcgacgaccctcttcacccatttcttcggatagaataccgactttttgaagaataggtgagagaaccttatcggtcttccagttcaatatcaggtatagttcttcactatccaaattacgagtcaggaattttagagcttgtgacatatattcaccttcttgacaaaaataaaaagggagctagagctccctttatgtcgttatacagcgtcttctttagcggctgctttctcttcttctttctctttcttcaagagataattagtcgaaatggctttccacgacagtacacgttggttggacttaaataccagaccttcccggtatccacgcttgttcttaaatgcagatggaccttcagccatagcgagaacatctttaacagacatttccttagaaggtttccagcacgggtcaagcacgggaacataattcagaccaaggtcttttacaacagctcgtgcttcggccggcaggagttcacgattaccatcctcatacacgttgaagatgtaataatcgtaatcagccacttcttcaaagttatcttgaatagatggtccaatcagttccccttgtacagaaatgaagcgaccggtgttcttgtggaacttgagaagacgttcgatgatctgttgttggttagttacacgtacgaagttattgtcttcgatagcggtacctttcgtccaaaggggcagaataataccattacgaagtttaccttctggagtaacccaggtcttcttacggaacagattacggttacggataaggaagttaccaacccaataccgaagctgctggatgaatccccatttctcaccacccattccgagttcgtagttccgcgagcaaacgccagtacgaatacctttgtcatcgacacagaatacggtcatggagctaccatccagcttataggtaacttccatgtcatcaccgtcttctttcaggttataaaacgcaacggtcttattctgaatgcggtcttgatcggacttagttagcatctcaggccacggtttcagagcgccacccagattaccaatcagcttggcaccaagcttaacgatccacggagcgttacgtgctgcatgagccttcgataccatcggaggagcagactcgtacttaaggatacccagcttcagggtcaggttagtatcaacgggttcatctttgaactcatcgggaatcggaaccagtagtccttgagagagctctttacgaagcttgatagttttcaaacgatgatagtttttaccgtctacacgtcgattgtcggaccgacggctctcaagaaaaccgaagagcttaacgttatccagaggaagaagagaatcaatctcgcagtaaatagcgcgatcacctttcttatattcgcccatctttacacaaagttgccaaccaccaacaatagccaattccagtgcatcggcattagggtgtttcacaacatcatcgatctcaacaatgcgtgcaagcttacgagtttcttctactacaccaaaaccttcgcggatcggtttcaattcatccatttcaatcgtcattttatttacctttatcagtgatggttgtgcgaacgtcattacggaaccgccgcactatttcgagtatttctttttgatctacataacgaatgtctgtcagttcaatttcacgacaagccaatgaaatttcagcttcaatctgatctgacaacgttcgacgtaaaccatctatcgttactttacccggtggcggcggcgctgcaatcatgtattcacaccccagttataatcatagaaggtttcaacgaaagacttaccaggtagttcttgtacgacctgctctgtgctatttaccaaggttacagcttgctcaaatgggacaggatgcccacttaccggcgagatgatcttgtaaccattctcgcgtaggtgatcaacgaagttcaccataccagtttcaagaccgacattataaatatcgttctcctggttggtagtgatttcataagtctttccagcagggatatcgacaatgggagtacggtcgtcactggtacgtgctacgtctcccatggtacgacttacagtccagcagaactcattgagaactgggttcgattcttgccattctttcttttcatctaaacggtctttattcgacattgcagttacctcgttgtggatacaagagagtaatatagatttgaaatcttttttatgacataaaggggagccgaagctccccatgtctattacagagaggtcgcaatccgttcccggatttttgccatcgtgtcgttcttgtagaattcaccattcttaaagaacagcttcaattcgccggattctgtctccagagtcgcccaagacatgtcggcttcttgttcaagaacgaagttaccttcttcatctttaattacacgaaggaaaccttttgcagacttcttactagatgcagcttttggatctttatacagctctacgaattcctcttcgatctgaacagcagtggctttaacggccataccgaacgtatcgcgagtgttgtactgataggtgtagctaccaataccgagaacgacgttactagaggcgtagcctttacgttccaagcgagacatgatctgctcggtacgttctacagtaatcgaatcgccatagatcaggccaacatattcgttcaggcatttgaagcctttaccgttaacagtaccgccaaaggaatcccacaggacttcaatcgcaccacgtacttcaacttccgggatagtcttttcagacaggaaatcggagagcgacgaagcaatgtgattgatctcgtagtattcgcctgcgatacgtacaacttcgtagccactgaactcaatggaccccagttcaccgatgtgcttctcgaaatcagcgcgatctgcaaactcagtcgggtaagccatgtagccagtaataactttaaccggatcaccggagtcaggacgaacaacaaccctggcaaggccaagttcattcttcagacgactttcgatttctgcacggatgctcgggagaacatcagagataacaccccagaagtcgaaggaatcacagaccagcgagatgatgccttccggaactttctgaagaatgatctccagaatgtagtcacgttcagcttccagtcgcagtttgtcatgcagttccggagtgatcacagtaccttcctctttgaggaagttgatcttcatttgcaaacggtacaggatgttggtagtggctacagcgtgttcggttgcagtaaccgaagcacccaacagttcagtatcgctattagcaccgtaatacatctcagcgtaatcaagtgccgggatggtatcagtaccagcgaagctagtcaggtgagccgagccagaacgcattgcatcttcagggccactcataccacggaagctgaaatcatgtgcttggaacttaacgtgctcacggttatcgcaagtacggtcagcataatggttcaatacacgttggtattcagcagcgatggttgcgttgcaaatcattttccagttgtacgaactaacgatggtttccagatagttcaccagccagtaatgatcatcgtcatccagactgttgtaaactacgaaagttggaacaccaatgttaacacgttcaccttcatcaatagccagtacagtcagaggcaggtaacccagttcatgtagtttgtacagacactcgtgtttgataacgcctttaccgcacatgttgtcgaaacgacgtgcagcgcgtttaacagcgatttcacgaggcagattgaagaaggtacgatcccacagttctaccagttcgtgccaagtaccttgcaacccgaagttaacgactttgttatcgtagaacgcagagcaagacttcgaccgcaggaactgcttagcagagcgcggggtgaagttagcatatttacgttcagtacctttcgggtacagagcaccatgaccgggtttgtagcagtcagtagcagttgcagcatagagagcattagacatatttttgatcctcggattagaaaacagaatgggagaagaatttcgggtcacgtacaccatcatgccgataatcatttacggcgttaggatgataggtgttagtggtctggatatagtcgtagtattcgttcagctcgtcgaaacccttggagaaaataccatgggttacaaacagacccagttgatctacgatgcactgttcgtggataaccttagcaagttcaatgaacgtgcggccaccatcacagatgtcatcgataaccaacagctttgctaaccgaggaacatcatgggcattcaacaaagaagtatgggtgatcttaccagtcgacagttcacggttcttgcaagcgtagagtacaccagcagcgccaatctcttttgcaatggcttcgatctttttacgtgcaccttcatcagaggcaaccaaccaccattcttgtggagtttccagaagttgtccttctacacatacccagctcttgataatatcagcttgggtgatttcgcgacagttgttgatgagcggtagcgacacattgctgtgcggatcgtacaaacacacggatgtagcatccaatgcgttgatcaagctagtcatcacactgatcgacaaaggttcaccttcatcgcaaacacgatcttgtcgtgcatacggcagataaccaataaccaggtgcatttcaggacgaatacgttgacgacgaatagcatcgaacaccaggaacagttccatgatgtcatcgctattacgaagccaagcattgactatgaattgttcacctttctttctgtgatctttcagagggatcttgataccgatctcaccgccagggaatttaaagggctgacaatcgtagtgatctgccaggccgttaccgtgaagctgagtaattcgaatcatttatttttcctttaggaaagttatggggaccgaagtccccgttcgggttagcccttgacgcaaacaatctgacgcagggtgtggacgatctcaatgaggtcatcctgagcagccattacgtcttcaatgttcttataagcctttggagtctcgtcgatcacgtcaatgtctttccggcattctacaccggcagtatcacgagcgtggtcagcaagagtgaaagtcttagcggcttgggttcgggacatgacacgtcctgctccgtgcgaacacgaacagaaggactcgcggttccctttacctttcacgatgaagctcttcgcgcccatcgatccaggaataacgcccagcataccctcatctgcacgcactgcgcctttacgagttacggatactttcgcaccgaagtggttctcgaaggagacgtagttatggtgacattgcacagctgataagctggtattgattggtcgacccatgtaatctgcaactgcctcgatagtggcgcgcatcatgatcgtacggttgagcgtggcataacgctgagcccaatgtacagcttcgatgtagtcgctgtagtacttggtaccttccggtagataagcgaggtcctgatcaggcaggttgatgtggtagagccgcatctcctcttttgctttctcaatgaagtaccgaccgattgcgttaccgatcccacgcgaacccgaatggagcatgatccaaactcgatcttgttcatccagacagatctctacgaagtggttaccagtgccgagggtaccagcatggttgaatgcacggttagcagccttacccagtttcgggtgtttagccacgatgagcttcagttcctcttcaagcttcttaacctgagcttggagctccggttcgagtttcttgtaaacgaggttgaagtcactccatgcaccacggtcattcgggccaccattgtcagtacgaccatgggggatacgggattctattttataacgaagatgttgcagaccatgagtcatgtcgttagctgtcagatcagtaagctggcatgcaatcccgcacccaatatcgacccctaccgcagacggaatgattgcaccccgcgtagcgattacggaaccgatggttgcaccggtaccaaggtggacatcaggcattacagccaaatgcttgtaaatgaacgggagtcctgcgatgttcttcagctgacgttttgcatcagcttcaacagggacgcctttaacccaagctttaattgggaattcattttgttcgttcagcataacgtatttttgagtagtcattgtagacgctccgagagttttaaggtttaggaattcaacgatttaacgttgtgccaaggtcgggatcgcagaattccaaggataggtagagtaatgtcatgcctatccgtattagataagacttttgagtaaattgtcatcagtccgattcaacggccatggataactctttatgtttccttcgtctttcaatatcagcaaaccatggtcttacacttaaccatattgcaggccaactgagaatagccgctacagccatccacactgcactgagtagcacccatgcgtcgttaccatcgtcaacatctcgtggagctatgtcgagttgatagtcagttccaacggggacatggtgataagtgtaatcacctagcttagtttcgtatacgaaggggacacctttcatcttcccttcccaacgacccattagctctgtgtagatcccatgtttgtatttgtgggtctcttcccatttccaggtcaatacaacctgggtcttacgtttggttacgtagtcagagaagaatgagttgtagactgcaccacccataaatgctaagcagattaggtagagcaccacacaacgcagtttaacccacttggagattggtacatacggctcttgtttcatagtcatcgtacagccgattgcgtttgcataacccaagggattccttgatgccattgcatttattgcggctgcctccagagttatactcatttaggattctcatggataagctggaacgtgtcgaacttgtattgatcaacgaagtgccacgcgagttcactcagcttaaagatatccggacgttcgtatttaccgaagtcgggtttctctttagccaaatggaaatcgatgaaacggtccaatacagggcaacgatcgatcaagtcttgttcagtggaacctaccttacagttgaccagttcctgaatacgtttgtacaaggtgggatcagacagaatcggtaggagttcatagaataccatcggtggatgttcacgactagtctcaacccacaatgctgctaacagtggacggagagcatagaagtatttcttcatgcggactttctcatccgacagccaacgcatcttggtttgcttggccatggagatatagtgcatgaagctcgattcgggaatgaagtgcttgatagcgtaatcacgaatcagtttgtaatcccattcgttcttacggtaaacgatcggggagttcaaccactccaacagagtcgggttagacttgtaagccagttgaagtgtcttggtgatactccaaccagccagatcgagttccttggaaaccatctcttcgatggtgtcacgaccttcgttatcaacccggacataatgactcggatggttaacgtagatgaagcgaacatcgtagtcactattagtagaagcgaaaccccaaccacgactaccggactcacaggcgtaaatgatctttacaccatacttctgttcgatacgagttaactcggcgtctataactgcatgcatctcatcactaacagggtgacgtggatccatcattcacctaccttttcaagtttgagtttctcttctttacccgtgtccaaatacatgaacatcgaatttcccagtaggttgtaatacatccaaccttccttaaccacttgatcgccatacgtcagaggaatgttcaattcgtaaatggcgtcataagggatgactacaggatctttgtcaggcttgttgaggacgagtgcatcgtcagtaagctcaagccattgcttacgactgatgaccccaagaccgatactgaattcgctacctgggtctttcccattgaagataccacagcgaacagcaggatcaactcgatcaccagcaataccgatcttaagagggtcagggtctacgcccatcaattcaacaaccagttccagttgacgcttgagttcaatcttgttcacagtgtaaattccttcgtgttgtattgacgtgcagagtcggtccaccatgtaggtgtctgtgcgtagtagtattcaccaaagataaaagtggctaaggttttatccaaagcttcctgataagacatctcgccatctttagtagcgaagtgaaccatgttgttgaagcaggtaatgatgtcagcgttttcttttgtggagaaaacaacggtacctttggctcccacttcggaatggatcatcgagctccacggacgaacaccacgatcagtgaccagatagatatcttgtacagccgatatggagaagaacgtacgaagaaggttaccgtaatcgggtaggtcttgctcgaacagaatatcgaggatcttacagaccttatcgatcttcttcattttctcggtgtaacgcgcaccaccatcattctcagtgcaaccgatattgaagatgatactgtaaatggattccacaagcttacagcatttgtagacgtacggagttccctttactttaggagtccatacgaaaagattgctctttcctggattaggttgcttgaactgatggatgcggtacggaatacctttttcaaacagcatgaagtccattattttctccaaaggaaataaagcctccccgaagggaggcttttatgtcagacagctactttcccagcgatgtgtggatggaactggtaatccagaatctcgtaatcttcccgagtgatatcaaggaaaggtttacctttggcctcaggcttgaagcggatggtaggagtaggataagtattccgcgaacgttgcagagtaacctgttcctcatggttactgtagatgtgacagtcaccaccagtccagatgaactcttctgctaccatgttaaactggttcgccaattgatgagtcatcagcgaatagaacatgatgttaaagggcacgcccaaaaattcgtccgccgatctttgatagagttgacaactgatagctcgtttcggagcaccatgttgatccaaccattctaccactgcttcatcggtagccttttcataaccacgacagatacgcagaagtgctttaacctgctcagcaccaccgaatggaggttgaccacgagtagtctcaccactaatctgatcatggtaagcatcagcttcgaaatgcgtttggtctagagcttgcactcgttcatctacggtaagttcacgggtccagaactgaataaatgcatggcatggcgggagtgcctgatcttcgaccaaacgtggatcccaagcacagataatcagtcgacgactatctggattgttttccagttggtaaagcagttcttgaacctgatccacacgccggcgaataacacactcatctttcgtgtaatcaacaccaggtacgtcaactacgaacttaaagccgcgtttctcgtaattagcccagtctactttaggaacgatacgaacatcgtcgatatcacgccaggttttaccatagaccggaccaagatcaccaccaaccaaacggaaggcagccaacagaccatcgttgtctttaatcacgatcttcgcatcgccaatgacaatacgatatacgcgtagagccatgccatagtagtcgaatgcatcgggaccaggaccgaaacgacttacatcagcccaggctttcaggttgatcaacagtagtgccgatttgtcctgttcaggatcaatccacttccaatcgacatcaccgatctcattgctgaaatgcatctcaaacggaatgttcttgaacttcttctgaacagctgtagtcagccaatcatcagaaaccttttcgaatacttcagtacccggcttaacccactcgttccagatggtgacgttcttgctcaggagatactcaaggcgagtgtcaccagacttcatccagttgagttcttcttcaaccgacggaagatgaatcttcttggtggtcactacagggaggttaccgttacgaagatcatagcggaactgtctaccgaacaaagaggtagtacccgtaccagtacggtcacctttaaatacaccgtacttctgggtatcttcaagtagttgtagatactgatgcattaaacacctccatcgttagaagccgcggtcagcttgctaggaagacctagagttttatgggtagtttcttcaatagctttcagaagagcttccatattaccagtaggatgacccagatgtggatcattttgataactgatttcgaaggtcatggggacatccacgacatgactgaaatcgacatcaccaacattcaccggataacccagactgatacctttaataaccttacggtcatgaccgatagcaatgaagtccatggtagcacggttatggacgactgcccaagcaccagtggattgcagtagattacgacttacgatttcagagattgtcatcttcaactacctttaggaactttgcagttacttggagaatgataccagattcggcacgggcgtcatcaccatcagattcataatggatactaccgccatcaacccacacgcgagcaccgttcggaacaagttcatcagttgccatgtattgaacttcagtgtaatcgcctgaactattgctagtgcgagagatacccatcaggtgatcgcaactgggtacgatgatacccatgttacctgggttaatgtaagcagtgacttcagtcaacccgatgaagtagtgaccacgagacggcggtacagtcagtttataattgttgaacggagtcaacaaaaatttgacttcattagtagttggaagaggtaaagcgtttacagtttgattgttcatttttcacctttgaatttcaccgagtgagaaccgaatatgaattcataattctcagtgtgtttacgttcggtaagaagacgaatactgttattgaattcgtcatatttgacaacagctacgactaggttattacgtttatcgtaatactgataagtgttatcatcagtgttgatttcacccagttcgaaaacttcatcattttgcttaatggcaatcagtttacggggagttggaatagtaccgaagtcgactttgtatttaaccagcgaatcttcagtggtgctttcagcaacgtaactaatcatttcttttcctcagggtcgtaggatttcgggataccagctacttcgtagaaatgatcccaatatggactttcgtcacggcggtgcatattgaaattctgataatccgtacagatgactttaaacccatctgcaactgattccacgaccggcatattaccagtgtgactgttgtcgataacgaagtggatgttattattgtgtttgtacttcagatcgaattctcgtttgcgttcaacaggggtatagctaattaaggatgccatgtttattcctcaagacgaagtttccagaacccgccctcttctttccaggtctcacgaatagcgttgtcagtacgttgaccgtccttaaacagcttctctacattggacgggtaagtatagttgtacaacgcaattgcaaattgggttacagctactcgggctggaataacaccagtgccggttcccatcaggcaaccgaggacacggaaagaatctttcttttgtttaccgtaccattcacacccagcaatgccatctagggctgccttagaggctagatacggaacatccgaacctttgggtagcctgcgaggaacacgcatcgtaggggtgtacaggagtgttgcagtgataccattgagtttggtgaattgaacgcaagcacaggaacctacgtttaactcaccgttgtagaaacgattgatatcgtgaaccacatttttctgcatgttaacaaaacgggcagctagggcaccatcatatccaccggtcatatgcccgtatgagttacccgcggtcatgtagtagtcaaactcgtccgcgtggtctccgagtgcatcaagcgtaccatgaaacactttaaggtcatgtccaagttgcttgacaaaatcagagatagctacgagttcttgaaactcttcataactgggggtgcaaaatacgaactccagtggtttgcgtccgatatctacagtaccaagagaaagaccatcagcgatctctttatggatacgggacattacgaatggagatgtcatttctatacctcacgacaaaaagaaaatagatggagctcccgaaggagccccggtgcgctgacctttacgatcaactacataatattacattgaaacgcatgacatttcgcgacgaatgtttttattatcgaattcgtattccagaaccacaccggcctgagtacgaacgactttaactttagttccattcgctgctgttgtatcttgaatagcacctacagctttccaacaggagtcaatactttccatcttagtggtggtttcagaagaaccaccagcataaataccagagacaatagtagtgctaatgagaatagctcctgcaagagacattactttttacctcctttaattacggtaagcttcggcttgcctttataacgggatggagcaacattaactggtgcaccgggaagatcgccaaaatcgagaagaggtttatcaacaaccttcagttcgggggatttcttgatcggactaacctccacaccaggttgattagcaatgaaatcttcagcttcttccagttcttttagtttccgagtatttgcacgttcggaaacataggacaagaactgagagaacaaatcgtcatcgttgctaaccatgtgctgtacatgttcaagcgctttctctacgggaacatcggtgattcccttctctgtcagccatgccattacatctacgatatcaatgctgacggtaccaggcgcaccattggcaatatcgcggaagggatgaacatacgtcggattctcggcatcaaacaaaatccgatcgacattagggaacggagagaacacacttgcattctcagagatctgcacattcacaccaatgaaagaatgccatggcagatgcaaacgagtaggcatacccgagaaagcaatttcaccatagaagcaatcacccgaataatcaatgtggcggcacgcatttaccgacagattgagaacgatggtaccattagtggcattgaaatctttcgaacgcatcatgattttacgaagcggttctgccagataacctacatcgataacacagtcgaagcggtacatgttgttatcagcattccagttgtagtatgcttcaaccagtttttgattcagtgcggaagtgagtttgatcattttgagtctccagattaaaggaatcgttcagtgatagaagtgatcagtttcttttctttattgagagaagacatgtgatcacggtatttcttgaagtaacctacatcttcaggaccatttgccattttgggattggccgtgagtatgtgatggatctgggtacccgtatagacactaatgttccatgtcttggattccgagattattttctttacagctgcattagactcatcgctatcttcaatgagataagcatcgatggattgactaaccgatcggctgaattcatcgagagcactaagatcacctttgggaaggttagcatgtacttctttgagttcttttaaagtacgcggtgctacacccggaacccaacgattgataataacatcaccatcaagttcatgacgtggttgcagctcattgggtttctggaatggatacatgattacctcaacggaacatgttctttatgaaattccatggcttaagataccatggagttgtcgacgcatagactacaccaggttcgttcgaaagtaagtttagattgccattgccatcacagatataaattttcccttcaccaataacaacatcgtcttttactggagtttctccattaggacgaatagtaacacctcgtgaagaacttttgtagtaatcgttgatagcttccgcttcaagctgtacgaagacattgttcatgatcacacatatttctttgtccagttcttccagtcgatgatcgaatgaatcctcgtcaccaccacttacaacgaagacatctggaatgacaaatagatctttgaataaaataccatcaatatgcaacctgggtctacctattacatcaccaaagaacaaaaatgctcggtggcgacacagttgtaaatgttcgcgatgctgttttctcagttccttatagaacttccaattagtgaaagattccgcagatataaaagacattgattttcctcgttgggtgtgtagggggatcaaacacatgatgtagatctgagatattttttagcgtaagtaaaataaaaaacgacatatagccctccccgaagggagggccaaatgtaccattacctaatcacgaccattttgccgtaatcttcagacatgcatgaatcaaacgatgccatgtatgcgtctcgcggactatccttagcgtcgtatataccacggacgtcttgaatagctttgggcaggattttgtaaagaacgttatctttgtccttcacaccgtatccctttagggcaaggaggttctgtttccattttgcaatgggttcagaacggccgcgggcttctgctgtagcatgagcagctagtgctagtgcttcacaataaacctcatcgacacgcacctctgtagcttcagcttgcagtggaaccattaagattccagctacaaccattagccgcattacgtgtgtaaaacattgcatcacgttggtacctttggttgttaggtcagaatataatacactacagcgtatcttattctttctttggggtagcctcattaacgtcgatgaagacaatggaatacatcttagttccattgggtgtcccatctgtaataagttcaatgaatgtattctcgtctccaaatatgacattagagttgttactctcgaaatattctttaacgttctcaaccattgaatttatagcatgttcagtcagaagacccctaccatttattccatagagctgacttgttgtttcgtaaacaatggatctagggtcatcataaccagaaacatcggcggataccataaaacgaattagttctggatccgactttgcagttgatggaatccactcgcagttattattgaaccactcaataaactgcgtatatagacttgaccctttctcgatggagagtgaattagattctgtatgctgttgtatgaatgtcacgagtttgtgatactgaataacagcagtgcagaacgacaggccgtgcgagaattgatgaatgtttacggacatatgctctcctaggacttgcgattaactttacgttgcaaactagccaatgctgtctgctggcgttcgatgatccgtcttgattcacttagcatttttactatagattcaaactggatcgccatatcgtctaaacgctgctctagtagagctatacgttcactcttatcacccattaaagtttacctttatagtgaatgtcgccatgatgggtattgttccgatacagcagagctggatcaggttctcgatttgcgataattaaattgaattccatcgtgaaacggtttttcatatatcgctcagaaacttcaacaacataagtatctgcaatggtgtcgatttttacagtagctacaagtttaggcgtactattacgaagcttatcccaaacctcgaacgtaagattgttttcgtatcgagcagttgtaggtattgtcttgaattcgaaaacgtttaatccatctggagtgaagacagctacgggtactagccaaaacacttcagttaattttaaattaccatcacgtgaatagaagaactgcttcaagtccccttttaccccgtggtacattggtataataacacgttgtgccgacattataattgctccgatcccgaccaattacgtttagatgtatcctgtactatcttaagacgtagcttaaaattaggcatgttccaacgcgtaataggtttcttccaatatatacgtttcttatcgagttcaacatgcagctcgactaagacacggtttctttgtttttcgaagatggtgaaacagacatgtcttggtttttctaaccaagtttctttataaaactttagtgtgtctgcatctttttgtgtatcaccgttgataatactttcaatatctacgtctgtgaattccaatgcttcaataccattcttacgaagtgatttaaagcgctcagaataggttccacggaaatagtattcaagatcaacaaacacggagtttaatcgagtactcatatatcctcagattgtaataatctacaggattggttaggaaaataaaaaaaggcataaagcctccccttagggaagcgatatgccagatggtgttttgatatgaataaaacgttttcttaacctggcaatgaagaatggatcgccagcaaaacgacctgttgctgagttgtatctaaaccaataccgtttgaactttaggaagcgacggcagttcggtttagcctgaattgtaactaaccattcatcatcgaacaagtcatccaactcgactgtaatggaataggtattgtcaaccctacctttacggtctagtaccgatatacagtctgttagatcgccatatttaaaaataacatgctcgaagttattgtctaaactaagcggtatagttagttccattatcaacctccaaatcgaatgttacggaaataaaccgtgttcgataacttggacttataaaggtttcaaaatggtttgaaccatactgaagttcgatataagcaacgacaataccttgttgatcacgcggaacaataaagatagtgtcaaccaaaccatctatattttttgaccgactgatagaccaattaaactcgtctgtaactttattatcggagaggatctctactcgtgttattgcctgttgtagagtgagatccaattcttctgtaaacagggagttcaacttccctctgtaaaccgtaaataaatcgatgtgtgtttgcatagctgagtcctcgatagttcattatagtacccagctcaagctgggattatttttgtatgggggtgtctttaaaaaccatggaaccaattagagtaagtgctgaggcgcgccctggattacctgattcgacaataagaatgtctctcacagtgtgtcacccatcgctacaccgacgtaatgattcattaacggcgccttaaagtacatgttgttggcactcttcattttgtttttgaattggtcaatgattacacgttcatcttcgccatttgcttcgaccagatacatcctgagatcatagatccatttaaggatgtcattttggtcttgttcctttttatgacgtttcttcccaattcgtttctttaggaagatactgcttcgacgtggctttagtttacgagagaaaggaatagttttgattaccccgttctcatcaatgaccttcatcccttctgcaatgacatccatgtaatagtcattgtgcagagctatctgttgatgcatattgtccatagcttctttatgatcgtacattcctatttcctttaaatagcatagacaacatattaccccatcctatccggaaggagtaatatgccatttcggtttgagggtgttgcttacaaatttgcttcccagggtgacggttctggtctacccttatcgagttcatgcaattgtttcctaactgcaaaacgtactcgactataccataggtacacattttccggcataaaagacgagagttctttagctaagagtattgcatatctttgagctgcggcattttcttgcgtataggctaacgagaaaatcttcgccaatacatcggtattacgatgccattcgcggagctctcttgcaataatgtcgcagttacgattatctccaattgactcgattaggaaacatgtgaattcatcacctagtccaatactaacattagtcaagaagtcaatcagagcaatagactctttcattttattagggttgaacaacttccgcttaggatcaagtctttgtagtctaaaccacatcgcttgtgtaccttcacgatgtagtgaatgcacttgacggaaaccccgccacatcttaaataatccaatcatcaggacctcacggaatatagcctgtcccgatggacaggctatttttatttaactgcacgtgcaaggttgtagtcagcatggaaattagcgtctgcaagtttccattccaacgaacgatctacagggttactatagaatcctgctcgtcgagcttttgctttaacgatggggtcaactatctggactcgggtaatgaaagccaatacccagagtacccgtttagctattactttaaccaatcgcagctttttcattattgagacctcgaccgaccctaatggaaggggaacttacagcgctttcaacgcttgctgatgttcccatacgatggtcttatattcaacctcaagttctacacgggcgtcattagaaatgctgatatctttagcattcccaactacacgacctttacgtacagtcagaccccatttatcgatcttgtcaaggaaagccttaacatctttacggtgtttttcttccagcttggcaatccgaatagaacgaacatggttacggaaccattctttgatagacgcgaacattgtaatctcctaggataattaaggaagttggaacatttcaagtttggatgggtcgccggaaagtataccatcagcatcataggtaacatacgggacatctaattcaatagctgtctttctcttatgctctgtgaatttagtcccaaggacacaaaagtacgtattacctgttacagacgatgttactttcgctcctagatctttatagtactgagttatttctttcctcgacatcttaccaaattgtgaccccgtaatcattactgatttacccacaagtggaccttctggtttcttgggagaaatgatatttaccccttccagatgtttcttataggaggactgcggtcgtgagttatcctcgtcgaagaactcgaatatactcattgcagttataggaccgatatcatcaatctgttcaagctcctctgtagtggctttactcagtgcttcaagagaaccgaagtgctgtgctaacctaagagccgtgcctttggcaacattactaataccaaacgccatgatgattcgttctaactgaatacctgctctaactttgttaacttcatcaatgatcttatcggctattttctccgatacattcagttgaagaagaatatcttttgtcagacacagtagaccgaacataccttgaggatccaccatcccccacctatataagtctttgatcatctcaataccaataccttgaatattgagaacttctctgcttacacaataggcataatggttaataacgcgatcagtacatatggggtttgtgcaatataattcagtacatccagatgaaccattaataacggtatcaacttgattcttacagcatgggcacactttcggaatttcaacttctttcagttcacccatccgcatctcagttaacgcgccagttattttcgggataacgtctccggcacgctttacaacaatcttatcacctatcattaagccaaggcgacgaatttcatcgatgttgtgaagagtgacattcgagatggttgtaccatggatatacactggttcaatgcgagcaacaggggttaacttaccagtacgacctacttgaaattcgacatcatgtaaagtactcactccttctgaagctggaaacttataagcaattgcccatcgcggaaaacgacttgttgtacccaactctatccgcttacccatgtcgttgactttgaatacaataccatcaatatcgtagccataggtatttcttttttctagctcctcttccagaatttcttcccagtaaccgtattcgagcgctccgggtatagcaccatcgtcgacagataccgacgaaaaacccatttgtcgtaataggctagcaccttctgtccaagtcgcgtagtggagatccgacgagtcaagcgaatacgcaatgaactcgacacccctagctcttgtttcaattggatctttgtttcggagtgcaccggaggcgtagttcctcgggttcgcaaatttgtcttttccagctgcttcgagttcagcattgactttttcatagtgctcatgacttacaataacttcaccacgaacaacaacacgttctaacggtttactaatatcgagtttagacggtacccctttaatctcaagtgcattcaaagttacatcttcaccaaccaatccatcaccacgggtgattgcttgatgtagagaacctttaacgtaaataagatcgagggaagcaccatccagtttaagatcgcgtgttacttgacaacgaggaggtagggtctttaaccaaccaaccaattcctctacactaaatacgttatcaagactcaacatgggaaaatcatgtttagccttggtgaaatgtttagcggccatgtaaccaactgtttgtgttggagaactagctgtaatcagttcagggtatttctcttcaagatcgattagctgtttacgaagttcatcataaaccgcatcggttataggagatccgttttcctgataatacttcttatcgtaatcacggattactttacagagtttggcatgttcctgtttatagttactcaactttattcctcgctcgcggatacaggtcgtcgatgtatacaccggtttcaccaaaaaggttaagtgtatccatagacttgatccagtcaatcaaatctttatcgaacggacacgaacttacagatcgtaccatgacagcagcttctgttgcattacttgtaatacatgcattctcacggaaggaccaacccataacagcttgtccattagcatagtggtctttaccattctgtgcgtatgtaagaataccacgatcggtcaggatgtaaatcttgccgtggtcattctgtagatccattatgttcttaagaacggcttcactttgtttatcaccctggggtacatgttcggtaagctgttctagatatttcccaagaacatcaatctttttgtctagatccttacgttgcacgatcgctcgtacattaaaataatttccattgtagaatgctttccaaggtttctcaaatggatgaactttaagttcattattactcgcttggacaatgaccgcttcattacgacgaacgaacaaataaccagccataaacaaatctccgatagttatacattttgataatgtagatctgagaaaaaataaaaagaaagcaaatgctcctacccgaaggtaggagcactatgttttaaacctttacacggaacttagaatcatagagatcttggaactctttgatcattgcccgttgagtcggtgtctcagttgcatcattaaagaactcatcagcgaattctttcttcttgcgaacttcacaaccaaacagttcaagaccgagacaatcaagtttatttttaaagtgacccagttcagacaaaccagattggtccggcttggagacctctttctgcccctcgggtttaacgcggaaatccgttacttgggcgtagcgaatttccttttcaggtgcaggacgatgtaccggatctttcttcttgttcttcactcgcttaggtactgtaggcatcggaagagcagttttaggtgcagctacaggctctgccttcttcttttctttcttgggtgccggtacagtagcaataggaccttgagcagcaataaggtctttaagcgagttgaatttaacgcgtgccatgcttgtattctcctattggtggtttgtagttcacatttgtaatatagcctttaaaaaggcttaaatgtaaaccaaaccaccttaataaattatacccgaggcagaataaccttatctgcctgtttcatgtatttaccaccacgatctgcataggaagtttcacaatcttgatcgagatcatggaacaccagttgcaaaacaccttcatgtgcatagaacacgttagggcgattagtagtgttctggaactcgaacgtgatatgtccttcccaacctggctcgatcggagtacacagacagttccaaccagctcgcgcgatggtagatttaccaatacacattgcgattacattccgaggcattcgaacatactctttcgaatgagtcagaaggaaaccacctgggggaactacaactttatcaccgtagactgtatcaaacagatcagcgctgatgttcttgtaatccagtacagggtgttcaagttctttacctgttacccaggctttgaaacgttgccaaagagtgaacttaggtagaggcttgaatactttaaactcagtaccagctcgaagatcataacccccagaggacagaccataggaagcgatacgctttccatgactatcttctttcactgacgaaccgtgaaatggttctatcattggaccatgtgcaccgaccattgtgccttcgcagtattcacgaattgttttatcagagagaactgtcattttttaatttacctgttggagacgtacactattaacatggtcagtaaatcaacgctctaccagagtctcttcgtctgatttatcggtcagagttgcgacatattgcttcagagcagctgcacgatcttgctcttgtttacgcaggtcatacggaccattctcttttaccatgtattcacggaactgcatgacgccttgaatataaccttccgggagaacagtagtcagactattggcagttactttacgggtgcgaatagccttaccagtttcaagaacatggtggatacggatgagctgacggttggtgtcaatacgttccgatacgcacgggaagtaaacgggatcatcaccttgcttaagactacccaagtccacttcagcgtaaagaagtttgccgtgattagcttcaaagaaagcccgtgcttccctaatacgtttcgtgcgaataatctccgcttctctaaccgctttctgatgtgctggttgcaggaaaggattcatctttcgaacatgtcgtcgaatcagtttggtgctataacgcggcgaggagtcggccatcgcaacaagattgttgtatgcttcgatggacatgataatttgttgcggatcattattgcgctgcatgggaatctccgttagtggtaaagtaatgtttcttaaggtggtccggattaaactctgctttacggaattcatatttctcagcgagttcaatgattggattttcatctcctttcattgacagtttgagtttccgacgaacccaatcctcagatgctttaattgtcacggcttttctccaattgataggtgggagctctttttccgaagataacgtttctacaagagaagcatccacaaacagtgctcttcggttccgacccatcgagcgaaatagcttgttgcaacaaacgttcatacataccctctacatcgttacctagtaagatttcttcaattatagtcaattcaatattagccaaaatcatctgttcatccaatggacgttgatgaacacgatgccattgaactgacgcattagctgaattcagagtacctttgattttttccagtttgtatgtttcccctgtgttacgtttgagttgtttgccgaactcaatcggatcaataggggaattcttgaatatgacgccttttatttgtttattcaaaatcaagtatcctcgggtcttgtggatgatggatagctgtccagtcaatcggctcgtatggataatcaagctcgtattgatctaggaacttgatgacccattttaagtcatcatcgtagtacaggttcttacggataggaacaccagcattaacacttaagcgaactgctgtattagtaccaccgttcaccacttcattctcacgcttccccttagggacggcataatagaaaataccagtgaccaactcatcgagagtatgaccatggatctggaagacgttccgagtatggagagctttaccgtaatcgttcaacccaccaaaactaccacgagcacaagcagccatactttcagctgtagcccatgtatcagtgaactgagacgcatccataaagaaagcattatcacgaatacgatagaagcttctacctgtaccactagcgagatagatcctagcgcctacctcaccatacttacgcgactgctttgcaccataccaaccagcccgatcagaatcataggcgtcgcctgaactaatagcccaaccgtagtccgtgagtgtacgaccaagacggatcattacctcaaggatccattcgggtacgttacgagaacctacgattgccatgtatcccctagccacgatagcgactcttcgatgaatcccattgaagctgggcaagttccatcggtgtccatgtgcctgccggtttggcgatagtcaattggctcagatcaaccaatttctcgccgccattgaaaccatgttctttgacacggatcttaactcggttgggaagatagacagcaagtaccttaaccgggataacgacgaattcgtcataacgcatgtaaacagtagtgccgccatgagcaccaacgaactgcttgacctgttgtttcagattagcatagttacgacgagcctcttgagtctcttgcatgtgtttatcacgcaaccaagtgttgcgcttacgtgcatgcttgtgcagagagtttgctttctcagggcaaccagcttcttcacagccgatcctcgcatacgccatcagttcttcgaatgcattcgtactaagtacaataatggattcgtctttgttcttgtcagtcatttcagtgcctcgggattttgtagtaatctgggccagccatgttaaagacataatggttgtgatctttatccatcggacctgggtatctatccactggaaacttatgtggaatcagtgctctgcgagctgtagcaaatacagtttccttatgtcgaattttgtaatcgctaagaacacgagtcatggttacacacggcttacatttgccacaatgtttttcattagtaggtgtctcacatatccaaatgtcgttcagtactctcttatctagatcacgaagaatatcgaccttcgtcatgccgagtaaagggaactcaattggaataggatcattaacgcaagataccttttgtagattataccaagcgtcttcgatgtaccgtagatgtgatccgaagtaggcaccatcatcactgacataccctatcatcaacttgctatgtcgagccgaatcagctatagccagcgccccaaataaccacggtgcaacctgtgaccatttggtattatcaccttgtaactgggtacttttcagacgttcatattgcgcttgtactttgtaagggtagaactcagaaaacttttcaaggattacttgtcgttgcctgagttctaacttcatcttttcttcgtcttgaccagcattgatgtacatgacatccaccgaacctttttgaagatactgctgaagcatgtaagtggaatctaatccacccgagaataagatcaatgggttcatcgctatttccaaaaagaaataaaaaggggagccgaagctcccttttctagttacagcttgtccacttctttcctaaccagatcacgggcttgtgctcgttcgatccgatggcatttcactttagcccatttacaggaagtgaaatagcgcattggacggcggctccagaactctttggcggactggtgtttggaatgattgctacgcgacatgagagtgcctcctttggctctatgttaataaagccaggaaacacttggttgtagataggcatgttaggacctcattgctttttaattacgatcgattgaatgcagcgagattcatcaaagaaattcccactccagttcatacggtattcgaatccgtctggcagctgatcaatatgcaagaacttaggcgctccagcagaaacgattttagccgcttttgaaatagcgaaaccatagccctgtccggatggattaatagcttccaggaaaaggaaatccccgccacgtttgaattcaatggttagctcatcgcccatttcattcagtaccggactatctgtgtgaatgattgaccagcgatcgttacgttcttccagatggacaaacatgtcacctttaccacgaccaatgtttttgagctctacatctttaagctcaatacccaagccattgagggtgacagtaacgagttgacgttgtttctttttcgacattagtagccccttctagtgcggaacggaagtgttccttcaatgtagcgacgttggtacgaactgcctcaattgtaattccgttttccctctgtacagacaaatggaaaggtcgatgtctgtatgtagtacgcttagcaatgtatttacgaacccaaggagcctctctctttgactggcatctaagtcgagttctaaggctagaggtttcatagagtagatcacgcagtactcctacgattgcatcatgcaattcaacggttttcttattagaagactttacgatttctataaggtcgatagtttcaacgagcattagtacaaaccttccgaaaaaagctcatcgcatgtgcaatgttcagggtaacgcaattggccagttttcttcacgtgttccagtgcatcacttcgagaccagaagacaccgtattgatcaatgaagccttgctcatagtcatcggctgcatatgccctgagtgcgtccataccgataagatcgatctgcgcattcatggatacacagtaatggcgagaacccgttacaatgtagtctttgtaacggttagctgcacagacgatgtaacgagtcttgttgtacttatcccaacgccatccagtgaaaccatcttcgtcgttctcaatccagcagcgttcacggagagtttctttatgcttgcgtacagctgcttcaatgatctttattcgatgttcgatagggacagtacttaccgctgctttcacttgatcccaagcgtcttcaaacgcttctgaatgtgccattcttttaccttagaaaccaatacggtttgctttacggggagaactagctgcatcagtgttcaatgcttcagccagagtgaagttattaccaacgaaatccacaggctcaagaccgttagcaatacgagcatcgttcgcttgttcagccgtaagggtcttaaaggtgaggatatcgaaagcacgtccaggacgaaccagagcctcgtcaacatcacgaagagttgggaggttagtagagatgatgatcttggttttggtagacacaagaccagcagtcgcattcagcagacctgccatattactgttaccatcctcacgcttggcaaccatcttatcagagtcttcagtaatgatcagcgagttatcctcgacaccacgaataaagctggtgagatcaccatgactcagtacggagtcttggtcagccagatagacgttgcgatcttcataaccacgagcacggaccatctcgttgatgaagttcgacttaccagtaccaggcggaccaatcaacagaagtacgttggcctcagatgctgcaaactcagcccaggtttcagccggagaacgatccaggaacggatacatatccatcagcttctcgttgtaatcacgagtagcgattacttcactccatgcatagagttcgtctttctggcgattcaaccggatacgcttgatgcttagcggtttggtctgatcgaataccgattcgaacatctctttaaacttggtagagaagtcttcagtagagtagatagagaaaccatggcaggtcgcttcctccataccctcgataaggaaaccgagaataccttcgtcgtccaacaacgcccaaccaccactgataccaaatgcatggagattgaacttggcgatgactttgtccttaatctcccgtatgcgttctttgatgtacacttcacgatctacaccgaacgtgtaatagatgcgaagtttctcactggctgattccagaccttgttcgttaagagtgaaatggtaagcgctgtaacggttacctgcctggattgccttcatgcacagatgagtataacgctcaatccaatattgctggttaggattaagtttagggccacgataagacatttgattttccttttaatgagagatggcataaagctccccgaagggagcagtatgttagtcaggtttcttagcgactactagacgagaccactttgtagaggaattaccttcaccttcaacattgaagattcggtcctggctattaggtggcatgcgaccagtaatactactgaggtctttaataatgaaaccagcttcacccagatctttaataagtttggtgattacgtcggaatcagtaatgtgaccaaggacgtggaactgaaaagtactagttccattgaccaggcgatgaccagctttaactttatcagcatctgccatgtcggcttctaatgcagctacgactgctgcggagtcaacatcatcagctttgataatatcgacaagttcatcaaatgttgggaatgccatgttacaccttcttttgaatagacatatcgttaagcttcatttttggaacggctataatgtacagtacgaagcataccgtagactcgaccattagccatgtctaatttaccattacaaaaacgatctttcttgatttcccagccaatgccctgaagaaacttagccacagctgcactacgtgatacgccagcctcgcagtgaacgattaacgtttcgccatccggaatcttatcgatgaatgtaagaatcttatcagcatgcacgtaatcgaacatctgatagcggttatcgacgtaatcttcgacatcatcgaaaacaagaaccaatacagctttgtgttcgcgtacaaattttacgtcttgttcgggacagcgaatagaaataatgtagctttcgtcagtcaatgcctgtgcagctaaccgtgaatagaattttactctcctcatacagctacctttcgatgtaacatgagacgagtccaagaaccagaggccataccagatacagcagtagacgcaccagtccaaccttgttctttcagaacgctgtatagttcattcaagatatcaatatggataactccgttgataccgaattcgtaaatcaacatatctttcttttgtcgaactgcatgttggccagcacatttaaccttatcagcattctgccatttgaaagtacgcagcaaggttaagatatcttggacagacagaatatcgaatccatcaaagaaatctggagtcacacgagcattaagctgttctacaacgacggaatccatggattccttatcatgaacgattataggtttctcttccgtcacatgaacgggtgggaaaacataaccggcttgaacatctccctctttactaacggtgaaacctaaacggagcgaattatcatattcgaccatacagggagctagctctatgtcccaatcaccaacccaggctgggtaatccatattggctgacttaataagactctgatgtgtacgagtcgttactaaacagtatccaaggttaatgaagagactaatatcatcttttaccgggttaaatagagttgctttccgatggtctcggtcgagcctcgctcctgccagatcatcacaaagatagaaatgttggcactctccatcaactcgttggttgaactgaatgagataaaatttgttattgtctagttccttaataagctcatttactttttcagcaatattcatcggtattctcctttctttgaaaagatgttctcttaggtaatatagatgtaagataatttttattaggcaatcctatagttcttccttaacagcaaaggtgctaatatgtttgaagtgctgttatcattgagtcaaaagaagcaagctatagagtatccattttctggaccaggaagtaaattcctaataaagggtaatgagacacttgggtatttcggtctagtcgattcgaaagatatttattttcgtgaacggtttatcgaacaggcagatatagccgactataccaactctattgtaggttcattcgctaatcaacaatgggttaaatatttctggatgggtaaggtttgttttgcacctttatctatctacatgaccaacgtctcatggaaggttctttacgacaaaggccttgtatttggagacaacacgattggtcaaaatattccaagtggatataataccgttcaagataagttctatcattttactgacgatgaagggagctggcagtttagaatccgtatgggtcatctaactgagaacccattcactccaactaataatgaagacccaacaagtgaacttggtcaggtatttacacgagtgactaatgggtcttgggacaatagacccacaagtgttatcggtcttggtaacggtacatggacaaaggcattgaatacagcccagcgcccaatgtatcagttttacaacacaagtatcacgtctgtaaataataatgccccaacgaataatggtatttggcgtccggtattagagctgattcctaaagatgaatatcacctagtaccaatagaaacgactattaatgcttacagtaatttagccgaagctagtattataactaatacagaaatcagctctggtggaattcaacctattattcagcttacttcactaccaactcctgtaagtattgcttatattagcaatgccccacaagatgaaacgcttatcgacttgaacagtatatcgcgaaagatagataaaacagctgaagttagaattaatagctttagtttcacatgaggatgatttaacatggcatttacaatcaatctacgttgggtaaacccaaacgacgcgtccgtaagtattaaaatttatcgatcagcaacaatgattgatagaaacaaccctggtacaccaatagcagaagtcaatggtgacgttgatggttatgctgacgaagggcttacatatggacttatttactactacatgtttgaatcatcgaaagatggggatgtagctaaatctcgtgtattccagttccatgcggtacctttcactggacctggtccacagcgcttagttgcaggtaacatcaattatggttactacggttctcttcccactgttgaatttatttcggacagtgaactaatcgctcgttgtggtttgtcctggaacgcagctaataatgctggtcaacgttggcataaattcgcatggaaaggacggactttctatgtacctgaatattccatcgcaactggtactctgtactggatggacctctataatgcgggtctagtatacagtaagaacgcagtaccatccgctgtccccggtgttactactcctgttcctcagggcaagcgaatcaattttgctctatctgaatttgaagtatctttgccttccgttctagttgatcacgatgatcctaattctgttagtgatctatcgtcatccgcagtgactgcattaggtaattctgacccatctctcagtaatggtaccgtcgagttatttttagccggtatgactagtcagttctatgctaataaaacattggaacgagttaacgtaaccggtgataatgaggctacacgtgttaatagtaaagctattctaacacgagatactccaaccactccagcttctgcatatatttcgcgaaatacgagtgcaacgaaagcttcggcttttgtacctcaacatacaggtagaacctcaagttcaaacatttggttccctgtactggaacttatccctggtaacttcgttgactttgaggtgtaatcatgggtattaaagtacaatggggtttgaccaatgatcgagaagcagtcacatttgatatttttcgatctgaaacaaaattcgatgaatcgacattacctagtgtattagttaatgtgcaaggaaacatcaaagagtacgatgatacaacagctattagaaataaagtctactattactgcatcggttctaattttgagaatggtgatgtaacctattccaaagtggttgcacttgctaacatgccttacactggtttcggaccaaatacccttcgttctggagactatgaattaggttattttggtgaggttccagattttgtattacctggtgaaataacagatctttgtggactcagtcttttgactgatattagaattccacctgtaacggatttcatttggcataagttcgttgtagatgggcgcattttcatgctgccaattcgctacgtggcttataacctacgttgggccgatgtctataatgcgggttgtgcttggtcaacacctggagaccattgggatgatcttcctgctcctgttaagactgtagttggtacgccaaccgaacaaggtaagactgtcattattaagaatcatagttacagagttggcctgcctacatttgctggtgaacgatcactcgcaagtatagctgctggacaggctgtctatgatcagtttaatgatctacttggtctcacatgggatcgtctaattgcatatacatcgaacatcaataagcctaaccttaaaacacgcgttaactcgacttcaacgaacgttgtaatgacgggcggcgcacctggttcgggtatattcatgacgcgtacattcgtaggtgaaacccagtctatcttagtcagaggtgcagcgcttataaacgtttccagtactctggtaaatagcgcggctgcattcatgccaattctagaactagagctataggtgattcgatgattaaagtaggcttttcggttacaggtgatattgttgacttaaaagcttatcgttctacagaaccatttgatgtgaataatcttccagctgtttttaagcagctggatgttactgatcgagaatttgtagacgatactgctttgaaagatacaccttatttctatcttgttattggtacggacaatacaggttctttcgtattgagtgatgtaaaagctatttgcattattgattacactaataaaggacctggtcccgaaactcccgtattcggtgactggtggattggctacttcggaacatgtccaatcgaagatgtctttgaggtggctgattttaaaacaaatttggctttaccatctaacttcacgaatactgttgatcaaccaacagaagcatggaaaatacagttcaaaggtgtaacgtattacatcccgaacagagttccatattctggaatgtcattcatggatgtttatagggcaggtgttctccttgatacggtagaagatggtgttggtactttgccatcatctctcactaatccagctgtaatgcagggtaagatctattctaggaatggtaatagttttgctgttgggtgtatcccacatggtgataaggtagtatacaccaatgctactgatgcgatggtaagtctccatgtgatgaatgatctagctttagataccttcgaacgtctattcaatacagcagtaaacccaactggacagttgtattctggttatcaacgcagtcgttacggtaatcagttaccatcgtctatagctccaggtaatggcttgaatattttctataaagctgttactgaagataaccgttgtatccaacgtggatttagcacatctatcgctcaccagcttgacaatgcttttacagcttccggtgctgggcgcggattcaatccagcattacgtttgattcgatgagacaacataaagcccggcattgagccgggcgatatgtctgtttagattagagagtccaaacatagtcgtcaaggcaccgtagttagatactcgtctttgctcccgcaaatactttaacgtatcaagttaaagaatcggctggatcacccccttaaagtgcagcgctatgcgcgactgccttgactatatcattactgttttagtaatctttttctaaatcttacacgtaggccaattctatgaatttaccccttaaggataaacccacatgttagactcattccgttcgatatttggcggcttgacagtcaaagaaactgaaacggagattatcatctctggtattcgtggattcgacatagtccgagatatcagtaagcattggaagacctccaagattacaaccaacctgtttaacaacattggccggaactcgttaagcttttataagttctttgctcctgaagtaatgtacatgttggaaaacattgtctattaccgttctcgatatacctctgtaaaaatgatcgctgctattaaagatgcgcttttacagaatacttggcttgcctctactaaagccattgatgagaaatcagtacaagggcgacttaatctagctaatctggcacgattaaaatttgatccaaaaccgtatcaattagaatatttcaagaactatacctatcggctagatcaatacaatctaaatggtgacttaattgccgcggccgccggtacgggtaaggcacaaccactaaacgccatggttaaaattcctggtggctggaaacgtatgggtgatattcaagttggtgacatggtcactgcttgggacggtaccccgactaaggtcaccggcgtttacccacaaggaaagaaacaaacttttacggttacattcaaagacggtcgcacgaccgaagcatgtgatgagcacctatggcgagtctattgctataattggacgagggacggtagtgatggttggcgagtaatcaacaccaccaccctgttcggttacatgtctatgaaatcataccggaatcgactttacgtgcaactctgtaagtccgaagaaggtatggatgtcgatctaccgatcgatccgtataacctcggggttattcttggcgatggcgggatcagttcgagttgtgtgaccattaccagtggtgaccctcaactattcgatacgttcagtaaagctctcccggataacctcaatcttatcgcccgtgacgccattaccatgggggtcatcaacaagaaaggtgagcgtaacccgtatatcagtgctcttcgagatatgaatttgctaggaacgaattccctttctaaattcattccgcaagaatacctattcggttctactgcccagcgattggctcttgtacaaggtcttatggacacggatggtacagttgacgagaatagcaacctaagtttcaccagttgcagctacatgttagccaagcagttccagtacctagttcgttccctgggtggaattgccaaactggcgttcaaagagcctacattcacgtacaacggcgtcaagaagtacggtaacatgtcttatcgggtagctgtccggtttgatacccccagtgcacttttccgccttgatcgcaaaatagctcgatgcaacgacaataaccaatacgcggataatcttcgtttacaggtgaaacatgttaacctgtcggatcgagtggagtgtcaatgtattcaggttgaacatcccgatcacctttacgtgaccgatgatttcgtcgtgacacataacacatatcttacttcagctattgccgagatgcttgatgctgaactcattgttgtaatgtgccctaagaatgctttggatctagtctggttagattccctgaaagagatgttccataaaccgcaaacagtttggcatacgttcgaacctaatatgccctacaaaggacagcgttggatcgtctgtcattacgatgcaatggataaggtagtagaacttcttagaaaccgtaatatagttggtagcaaacgtactgtgacgattctagatgaatcgcacaacatgaatgaccctaactctacacggactaaactttatcaactcattgtaaagatggtcggttctcgtaataatcttttagcttcgggtacgcctgtaaaagcattgggtgttgaactgattaacttactgcgaatagtagatcctctattcactccgcaggtagaagaacgcttcaagaagatgtatggtaaagaagcctctaaaggactcgatattatcagacatcgattaggtcttgtatcctacaaggtagagaaacaagaactcgatctagagcccccgatcatgcgtccttatccaattaaaattccgaatggtgatgacttcacccttccggctattagaaaggtaatggaagcatttattcaagaacgctgggcttactacaagaagcggagacctgaagatgatagacgctgggcagagttctgtggactccatcgaaaaaccctcaaaacagctgcacaagaaagagccttcaaagagtacttggatctggtcaagtatgttcaacagatccctgatccacgctttgcaggagaggaaatcaaagcaacgaaccaatatgaaaaattagtatttggtccttcccttccaaagcagttcatccatgagttcagggatattaaatcggttatcaaatatactaacctcaagattcaaggtgaatgtcttggtcgtgtgttaggtggtaaacgtattgaatgtcatgtggcaatggtcccgtatgttgactgggtcggtattacagaatccactcacaagaagacgattatgtttactagctttgttgaagcagtagaagctgcggatacacattgcgttaagctaggtatgaaaccactggccgtttatgggaagactactaatgaactggctgaaatcgttaaacgtttcgattcgagtaaggaactaaatccactcaatgctacatatgcttctctatcgacagctgttcgcctgacaatggcagatactctgattctattgaatagtccattcagagcttatattctagaacaggctatatctcgtgcttatcgtttaggtcaagattctcaagttgtcgtttaccagtgttctctcgatactggagatatcccaaatatctctacccgatcggctgatattcttaaatggagtcaagatcaggtagaagcgattatgggtatcaaatctccatttgaaattggagaagcaatggaagatcatggtgatgaaacagagttcgatgagaacaaagtaatacacaacgttcttcagaaagcattcgaaaaattcgacatcgagattccggcagttgatttcgagataccccttaaacccaaatctaatgttcccgcatatttgcggtgattggagtctacaatgagtgatacaaataaaggtatgattgcggccatcaaccgttatctacttaagatcgaagaactaatcgctggcggcggttctggtggaggtggtgcagcagccatcatctacgagagtacaacggtaccggcaggcggaactaagacgtatgatcttgttcctttgattccagctggttcagaggtaccccgtgcagcttctgtagaagtaaagattagagatactgtaagtggttctctcaccgaaggttgttacattgacgcttctgctgtattaacctggggtattaaagacgatggtacgttagttattgctaacccgtcgtctgccactgttgcatacattgtcattgtcagagcaccccataaaaaaatcgtaccttaataggagcctgaaatggcatatgctaaccctgacaaacaacctggggcctatcctagtacccaggttgtaaaatggacatttgattctaatgtcgctactaatggtgtcgcgtattctgttaatggtttaccgccagtcgtttctgagtatatcgcttacgattctttaagcccgcctactccattcattgccgttacccaagatggtaacggtaacgttgtttacgatggtggttttccgaagttcatgaatccacaggcagcaaacatttccatgactcagggtgttctagatttctcagctagactacaacctgatgcaaacggtctagacctttgctactatgaagtaattaacaataagacttacattgttaaaagtggagatgttcttgtttatgaccactatgtgttcgatgatgcatattttggtttagactgtaccgtttatgatgaaactggtaataaccctgttagatttagggactacagtcctgtaatcaaagacaatggtaaccccgctactgcaacacatccagttatgtgcagagacaggccagaatggaaaaacaaatgggtaacacgtacagtcccattagaagccattgttggtaagagattatcgacttggactgtagcattcgagaacgatgcagatcctatccttgcaagagagtatcgtggtcagctgagaaatgcacgggtccttaacggaacaactgttgcttttgatgtcatgacagataatcttgtagttaatccaacaacaccgcaagattggataggtagttggactgttacccgtaaacgttatcttggtccaggtaaaaacctaaactctagtcagacctattttaagaactgtcttgactttattgctaaccctgcaaaagttgctagtggtaataaaaacattcttgtcctaggtgatgcaactactggtagctatgcactgaagaccgcgttcaatgaatacattactaaggttgcaggggccggcggttttacatgtacattgaaggatcagaccgattatgatggaacccatttaaatccaaccttaacggaattaaacaattacgcagggttggtatttgttggttctttaagtgatccggatcaatcggttaacggtaagttcacgaaaactgcggttcaggatattcttacatatcggaaagccggtaatggtattttcatattcactgatcatggtccagctattaacagtattgaagaagcatatccggttccaactgcaactaactgcttctttgttactgctaaccaacttgctgtaaacttcaacgcatacttcaatggctccgttgacagatcaaatgtgaatgttggatttatacgatcgacttatggggatcatgtcctttataatgatctaaccgatggcgattttatcgtagccggcggcagtgaatcgagtgtagtcgttaaagaagttgttttccaaaagaaggatccagtaacactgaccctcaaccctggaaaacatactgttaacttcttgctgaagcttactaacggcgacgtcgttccaatgacgtttgtctacttgatcggagcaggtaagtacgttatattccgagataacaaaggagttgaaattacacaactactcaatgacatttctgatatcgctgatatcgtagttgaattggatggcacaagtgttggctccatgatagcggatatattccgtgtagacataactaaagtagatccatttagagatattaaagtgggtactgctgtttacgatccggcaaccggaagtcatcaaactatctatcctgttgatggtatctacgttaacaacgcggatctcattaaggtacgtatcactcaaccattcacttatgaagcaactcttcctgtgactcggtatcaacctccgatcgctggtaaatatggtcgtgccgagaatacacttccgttaatgccgcgatataagacgggtggtactaccactgagccaatctactcgatctctcatatccaagttccacggagaattattgaagagatccaagttgttcgacctgtgtacaaccttactgcgataacgcagagtgtagctgatcacttcaaaaatatcattagttactttgctggtgagcttcctcgtaacgaagggcaagcatttgcctataaaaccgctgctgacacaagtgcagctctagctcgactatctccaccgacacctaagcaaatcttcgatacatgggatcgtttctatgctgatgaatattttgctaaaggtcaaggtatcccaccgttcctttccgatgggactacccctcatccagcgggccgttggtattgggacgatacgatcaaagctgctgtaatgcctgacaatacaagttccattactggtttcctttcagatgaagaaccagaacaatacacacttgaagttacatgtcaatctaacaatggtgacgacgacttcttgggtgtggttctggcgtttgttaaagagggcgatcaaagccatcatttgacactcgcattgtctcgtagtaactcgaatggaaatggacgaggtaatgaagcacagaacatcatctacgatttgagtatgggtaccagacagaatatcatttctgttaatactggcgattactctaatcaaggttggaacggtgctttcaaacgagttaaggttattaggactggtgatatatttaacatcagtatctccaaatggggaacgaccgaatatgatccaactctgtccatgacggttgacctgaacagtgatccactattggctaagtttaaaggtcctaagaaatacggttacatggccttctcgcaaccgcaatcgtatttcaaagacatcgtttatactggacttccacgcaacattgtttgcgatatgggttccaataaagtttattcttggaatggtaccggttgggtactaatgcagaatacaacacctaaaacgatttacggtgcaccacgggtaatcagaagttttgaggacccaacacaagcttggagaattccagttaatggaactccggtacctgtgcaataacggcataatagcctcccttcggggaggctttatgttgtcagcccttgctaacgccccagacgcgcttacgttgatccagaagcagaaaggcattctgtgtaaggactaggtggaaacggcgcttacagagcgaagcagtgattgtttctactacaccttcaaagtcaaggttagtatcgatagcagtttgctcagctttcgatttacgacggtcagattcacgataacgacatttccatgtagtcgttgcaatctcagtaccgcgtttaaccttaacttgagaacggtagaaaacttctaggagtttaactgctagttgttcaacatcttcgatgcgatcatctgcattagatagagtcacacaagagcttgccatgtgttcatgcgtatcaacactgtcattcagtgcccgcattgttggatcgaaatcaagacgtttaacaatgatgttaatgacatcgccatctcgtctaatttcaatacagcggatgaagtcgaacatatcaaattctttttcgatatttcgcattagtactgcaagtttttcaagcgactcttcgtcatctgttccagagtgcttagtaaaagcaaatgttagatccgacagaattgtctgtggataactcgtggagatcagaagacgtaaaagagattcgcctcggcatttacgaccgggtttacctgtcatctgttcaagtacggttgtcatttctatttatccaaaatggtttcatgtatagccattctttttaaaccagtcctcgcgtgtcgccctggcatcgaatagcgcattatgcaaaagtttagatcctttaccactgagacgatcatcgatatcaaaagtcaatggttgaatcataatccacttccccttctcccctaatagggctttgttaaaataaataacatcgttggggtggttaacgattatattcatgccagcaaattgtgatacaaatttctcaaggcggatctggaattcttcaaacgaaataggatctttctgaagaataggaatgacgttagcctttacccagtcgtcttgaatatgcttatgttcgagtacttcatagaactctctgttaccatcttcggaaacaatagcaagagaaattaaactatcagttggtacatcaaattcagcgtcacaaaagaatctcatagggagtgaacctttacgataaggaagtcataagaataagggactacacgaaataaaaggagcccgaaggctccagttattttgatagaccacggatattacgaagaatctgacaactagcaattatcttaccacgagataccctggaataatatccttgtgcctctagatatttctttggattatcatcggataaagcttgctctagaataaatgtatcaattccgtagttagttagtacaaactgtgccacctcatgatcccaacgttttgcaacggtagaactagctttaagataaacatgagctgtttgctcagagtaacctaaagctactaaccacgctattcgaccagcagcataaataagtcgagtgcgtgtattcgatggaaccgccacaatataccctgttccgggtgacctctgttcctctactgttctgatattccagtcaccgatcatacgagggatctgagatagatcatctcctttaccgaaatacccaatagataaacctttggcaacttgagagtcaatctcagtagcagtattctgactaataaccatcttcccctcctataggggccacggtctcttccacaacacgaaaatatatatccttatactttcatcagataaggcataaagcccgccctaaggcgagctatgcgtttatacagggagttgttgcaggaagtcaaactgatatgctagtagaattacccaaagtaccttacacccaatatgaatccattggtcagtatggaatccaattttaccatcacatttcagataatctgtgatgcaatggataattgtttcagccgcccctagaacaaaactacccgttactacgtatacccaacctccatggataagaccatgtgctggaagaacgtagggccaataggtcttacctagttcagtagtatggttctttgcagcggccataaaatcattctgtagcgcgtaatcgcaaacagcatgaccgacgagtaatacgaagagaagttcgataagggagaatatttccatggtgatgttccgggcggtgggtatgaggctttgtagtctttgctacatatggttacaacttaagtatttaactgcgacgaacattaaaaccagagatattctgacgtctcccttgtcgacgtacttccagattacgcaatgtttgtataccagaaatagttggagtaggtgccattaagtcatgtaccaaacgaccgagcacttccttctgttctggaataaattcaaaatgttcatctggtggaagaccttgacgagaaccctcttgccaagctttatcaatcggatggataattccatttaagctaccgaattctaagaatggtacatcggatgcagtagcattatgttcagctgctaatctacaagcgcgaccgtgtgctacgtatagtttagcatcagcttcccatgcgtacatttcactaacatcgcggacaataacttcacaaccgagatccttcaggaaagaagtaacctcagcgtaatacttttcagatagttcaattttcccaaatttgggactacccttgatgactactactttaaccatgatcgtatctcgaatgctggattataggattgagagcaaaaaaaagaaagaaggtattggagtccccttggggactccatttatattgttatttgatgccatcgtaaatatcacgtcgcgcggggttgataccagctacttgagatttacggttatcgatgtaacaaagatactcgtcacatgttgcagtcttaacaaagggaaccaattgagccagctctagtagagtccactctttcccaagatagttacaacgctccatctctacattacaatacacattgtaaagtgcttcagtaaaacgtagatctagtgtttcaccatcagctttcttatcgttgtatttggaaggtaagagatcacgaatagggaactcatgtttcaatgacccatttccaaacttaatagcagtaaatgagttattaaccatggtcaaataataaccacgtggaagttcccaataggtggtaccgatatgaccgcgtacaacacctacgagttgtccatatgcatcatggcaatattcattaatacatactacttctacattgccgttagttacatagctgtaaatctcagtaggtttagaacgacgtgtaacagctactgtgatttcatctggccatgttttccatccgcatacaccatgtcgtgactcgttattaaagaaacagggagcaacctttggagtaaaggtagaaaagaacaaaggtgtttgtgcatatatcagtggatcttttatttcttggccaaacacagtgccgacaaaagacattagaaaaaggatgataaccttggtaaagcgcatttgaagtttcctcttggtaacataaagaggcccccgaaggagcctcccgtgtttacaacttaaggagcgagttggtaatatttaccgaactcagcacgaggtagggagaaaccatcttgacggtcacccatgcgtttcagatagatcttgttggttttaactttatccaacgtgacagcggtagtaataccgttgcgtttaacgatgaatgtacgaccgatatagtcggacagagtatcgtcgatttccgatgcttggatgtaacgtttcacagagagagtctcagacatcatgtttcctttattctgctacagcggtttcaggttaaaccggctcgtctttgttgatcagatctttccagtcttgcagacgttcatggaagtggaacagcgagtggatttcacggttcaactcaccaacacgtgccggatggaagatagtctcgtcattggtcttttcaaagattttacgtacgatcttcttggccagatctttgtaatacggcaggagttcttcacgacccaagatcacctctttgatgatttgggtttcagcgtattgctccagtgccacttccagatcaaaggcaactggttcaacaggtgcttcttcaacaggagactgcggtacatcgccatcgttctcttcaccaggtacagtttccggaggaagatgaccgctgttctcggttttctcttcaagctcatctttagctcgcagtgcttcgtgggcctgaatggtttcaatgatgaattgaacttgttcatcaatgggagcagtgccgtcaattactttagtcgaaggactaaacttaatctgggcatatgcgttgttaacacgagtttggtaaacttcgtcaacttcgtaacgatccagatcacgaccgctatttaccatccgttctttccgaacttcttcaggagtttccagatagaagcacagcggctcaggaacaccatcaccaataacgtgcggcattacacccatgaacagatctgccagattgggattggtatcgaggtaaggagctacgttcaggcaccaagtagagaaaacaaagcgatcagatacaacccacttaccgtcactcagtgccggtttgacgatatgctgaatgttctgccggcgatatgccatatgcaggaaaatatctgaaactggatcaattttttcttcacgatgtttcagtagaaccgatcgaatctcttcagccatttcagtaccaccaggctcacggagagctacgtgcgcgataccgtcggcttcaagtcgtgcgatcagtgcacggtgcagagtggatttaccggagaactcagggccttccagtacgatgaaattgcggctagcagatttggtcattttgtttcctgtatttacataaaaattaatcagatggaaaggggctccgtagagccccattcgatcaggtatttacttcttcgaacagctgattgatgtgtgcacagacacgcttcatttcagcggagtttgtcttggtcgatacagtaacaacactgtggtccttaccatcgcgactgaagataccagcaacctgagagttagtggtacccatgttgtagttaaagccgatctcagaaagatccggattttctttcatgcgagttgcagcttgttcaccagcaacaagagtaacgcctgccaggagttcaccttccagtcgttctttcttcttcagttgctcaaggctgataccagctccacccagaactaccgattcatagaggtcgttcgggatgtcgaaagtattggcttcaccaagaataaccttctcgcgaagtttgtgttcttcgatgaatgcaaagctcttcagatctttagacatgtgagtatttccttgtgaaagtttgatgtgtttattttgagggatggttcaaatacaacctactctaccgtaagttccttacgatcatgagaggctgtaagagaagccattgtattacgctcatcgaagatacgcctggacattgcaaccagctctccaagtcgcggtagtggcatcatgcgcatatccgactcatcgaacttcgctccaccagcatgacatggaatttcccaacaacaggagcaatcagagagagccataacgattccttagaccatgcgagcaggaataccaaagcgagtgaccaacttgataggttgttcttcgtcttccgctacctgtacatccacgctgacgtaaccgtcatattgcagacgttcgtaaacgctctgggtgatcaacggccagaacttcttatcggctccgaacagagtctcgatatggaaggccagacgaccattgttaccagttgtccagttctcgggttcggccattgcacgaccgatcttacccatgatgccttcaagcatcttgtagaaacctggaacagttgcacggagcagacgagtggaggtagacgaatgacacaggccacgaataccttcttcaatgtgttctactttggctttgcctcccgtgcccacggcatagtcgatctgcacttgtagctcgtcaccgagagtagtcagtacacgcatgttgccttcggaatcactgaccacgtaagtataaggtttattgtggtcgatgttttgttctttcattttttactaccttcaattaaaggaattaacttgtcattctcgcgaatggatattgtgttagctgttacatggtaatgccctcaagatgttaatctctagtgcatacctgtgatatagatttgaaatattttttaatggaacataaagcctccccgaagggaggcatttatattagttaccttcgtaggtaccttcagtgccttgtgcttgacgacgctccagtcgagcgcgaatcagttcacgtgcagcgttcatgtggaacaatgctttggcattttcttcacaggcaaacttacccgattggaaaccttcgaatacaatgatcgaagctgtcagtagatcttctacggttaccccattaataccaacttctgggattactccattttgaagtagaataaccagttccagtttgttatcaccgggttcagcagctttgttagtagaagcatcaaaaccagagattacaatacgcttcggtgcgccggacagttcatcaacgccgtaagcatcgatcgtcttaccaccagaactaccagacatctgaccatcttccagttgttcaacagagatgtctacagtggtactagccttaacatcatccggttgggattcagcgttagcattatccacatccagattaccttggtcgagatctttaacctcggtttcggattcaacgttactagcgtctacctgttgggcgacaccatcttgactctctacgctgagagcccagtccagacctttcatcagttcaccttaagagtagcggactttaacaatttgcagaagcagttctacagcgtagttaccgtcagccttagcgatacccggcatctgtgcacgaatagtcgccatggcagcggccttacgcttcagaatattgcgttccttactgttttcaacttcagccacaccaccaatcagggcattgactgcgatattttcaatggatgcattgatgcgtgcaccagcggtgtatttacgaaccagtttacgcagttcagcttccaggttctgtccacgatactgttcagcttccagataaccggtagcaagttcggcgaagttacgaacgccggacttaccgaccaacagattggtcagagtatcaaccggaagagtcgatgcgagctgagccaggtcattacctttaatttcagaacgggccagttccagtacggattcaacaccaaggagtttcagagcgattttgcgaatgatagacattattgcgtttcctgtattaaaagcgatcagaagtttgagcgaaggcagagaccgtacgggcgacatcaccatcgagaacccaagacattaggttcgaaggactacgccaggacttgaaactttgaactgcacgagtcaggttaagattcaaacgtttaccagcgtaatagaaatctgcccacgattgcgatgttagagtcgacacgtaatcttggaacagactttgttcatcccacaccgctccgtcagtaagagcaagcgcagtagcaataccaccatcgccagcaacggcttcaccagctgtagcagaaatagcacgaccagcagtacccaaccaacttggactagcgaagccagccttcagtgggatatgcattaacttagataggtctttaacactaaaggttacttcgcaaccaagcatttcgtgttctgcgttccaaccaacgttaccgacaccacgacggatttgaatgctatccacgatccccaattgtctctgtactcgacctttatggaaaatctgacagatgaacggagaggtgtaagcacttcgaccagctgaccttggtaatcccattgggagaatcatggctagtggtacgtatatgttcatgaacctggatattttatttccataaggagagatcaattgaacagtatacgaggcagatggcaaggacgccattgccgattcccagtactcaggtgcatcaacgaaagctgcgccagccaaagtctcaagaccggataagttaacagagtctagtgctcctgaaataaatcctttaagcatatccgtaacagcaccaacaccttcagtgatattaccacccatgaagtcaaacgatgctgcgcggccctcacctactttcgtattcaaggtttgtacaacacccacatcacgtgtagtgttagtaaaggattcggatacttcgccattatagtcgacacggaatgtaacgaactgagaaccatcccgctgtgcacctacaacgaagtcgtacacgttcttcaactcgccccagctgctaaaactttcagtatcgataacaccattcttctcggatggtttcttatctgcttctaaatacttcaagaaataatcacgcgcatctgctccaggtttagggtctgttacagctttagccatttcagattcgatacctgcccggagttctgctaaggtacgtgctttctcagccattgctcgcattgatttttgagcttggtctgacatgcgctgcgtacggccagccaaagacattacatcgacaccgccatctggacggaagaaacctgggaagatttcatgcattcgcttaacgtcatctaaccctacccggtggcctgggtcttctaatggccgctgagaatcatctagaatacgaggaaccatacccagggcgatggcgaactcgttagccaatgtattcacagacgaccagtatgcgtgcatagttggtttaaaatagaaccacttagaaggctgcgatttagtcaagaagctaataacacgagatacgccagttaccccaagaataaatggttgaaggggcagggtgatgaaataacctgttacgttaccaaggttgtaccaaagatcggatgtaacgccggtattagctaaaccagcagctgaacgatcatagaagttcgtgaagaacgaggtccaactcgaataacgtggaacaccaaacgacatgtgtacttcttgtttagtatcgtcatgtgcttccgaatagtaacgacccatacctaagaaacgatcttcataggtacgaccacgaccaggctgacggatatcagcatagcgtgtgtattgtgggagagggttaatagcgaaactaccacccaacgacgtatttgtaaatttgaaagcagccgagttagcgtaacgccgtttggtctgagaaccatacgagttcttattgtcattaataggtaataagaaagcttggcgcaaccaaatgggcttaacatctgttgccattttgatttcccttcttagcggaaaataaagcctccccgaagggaggctccattgattaagttaacgagaggggtgacgggcgattttgagccgcggtcgttctcattaacgtggaggtcatactattatttcctccggcttgggttttcgaagcttctttgatactactgtccttttgttcgttcagttgtaccaaacgcttgagatgatcgcgcatctcaattagcgtcttaagctgctcagcttggatatcatcgatctgttgagccttctcgttattacgacgtacttcagcttgacgagtcgagttctgttgctgtgctgcttgaagagctgcttcttgttgggcttggataacattaccgccactatcagcagatggattagttccgctagtagttgttccacccacggggttcattggagtaataccaggaagtaccggtgtttgggcagcagtaccagtggcactgtatgcttcttcacgagcaaccgctgcattaccagcattgttactatcatcagtattccaaagttcggcagcagacgccttagcattagccttggcttgttcttctgtcgcctcttccggagtcatggttttacccgcttcctgtgtagctacagaactaccttcagctccaccacgatgctttgcaatcttctcttcgaacatttgatagatttccccgagagtacgaggttgtccacctttcttgtagaagatcggtcggttagcagatgctgcttcagggaagaccgatgcgccgatggtatcctgattacgagtcaagaacttacgtgcaccacctggtcccatgaagtgagcgatgtaaagatctacgtctgttggatcgcgtcctaatgcatctttaaggtaggtgtagttatctttaaggaagcatgcacccattaaggcgttgatccgaggatcaacacgtaaactacgttgggcgtcgtctggaggaataccgaacttggagccatgtttcgccaacattgcgtcccaggtactattaataaactggaaccatccggttgcagacgatgtcttagctttgacggtgtaatcaaaaccagactcaagcgatgcgaagatgaacagaagttctactggaataccgaccatcgctgcaactgcttggaatgtttcagcagctgcttgacgagacttattggctttcggatatggaatctgttcccaagctccaccgttaccctttgtcagggttccgtatgtacgacctgttgcagatacctcgccagccataccaagtttgtactgtgtgttcgccgcagcgtcggatacataatccattgctttagcgccagctgccttggtattactccatgcgttacttactgtttctttagcagactcccaagtattcgagatagaagccattgccctctcggcaaagctaccaccagcggctgcgttttgtgttccagctgcttggtcacccgcagattgagtcggcgtagacatgatgtctttgcttgcatctttcttcaattgttccaaatcagcttcagccattttcttgagatcgtctttgctacccttaatcgggaagatagaatcaacctgccatacactagagccgtcccaattagtgacgcccaatacggcattacccacaataacagcatcactgggtttgagtttagattccatgttcgcaatggttgttccttgagtcgaattacgcattgcaccgtagtaagcacgagcaacaggcatgaaacgaccaacgaaccaatcgtaataggtagaacgatcctcatcgttaccaacgatatctttaccaaataacggtgctgtttcctgcatgatcgattctaggtcaccacggaattcaggaacaccgccctgaatagatagaccatcgaataccattgcttcagcattgagaagaggatagacgttgtagaaactcagtacttccaaaccgtaggcacgcatccggatggattggagtgcagttagcttagtagtagctgccgaagtcgcaacgattggagcacctgttgaaccacccaaaccagggaaagccttcttagcagcagccaagggaattgctgacttagtaggatccattggactcggtgcggttttaccagttgctgtatctgccgctttcttggcgatatcctgagctttggtagctacttcggtattagccgctgtagcaggtaccgtatcatctttcttctcgcccgctttataacgaacgtatagagctttccaaagttgatcagctgctgggatagtgtcttccaattcgccttcttcggagaatgggtcaacacgatactgcattggtgtatcacccgatacagaaatcttaacagctttaactaatggtcctttcaattcttgagggaacttactatcaatgtcaacgagtttgacttcattctttttgagtttagctagtgctttaacccaagtcaagaagaccggacggaaacgcatttccaaccagcgggacatacgcattacttgaacttcattcttaacatcgatgccaagaatatcaagaatagccttaccaccaactccactgatattaaagtcgggttcttctgtccgttcggttacgcgatcaaaagcatcttcaagtgcagaaactttctgttgttgatcgtgatcggtaataccgtactgtagcattctgagtcggcggaactctgctctttgatcgttcatctgaccaaagataggtttcaggatatagcgagcagttaattgtccaagtggattaagactcattgcagtcagaatacctgtctgctttgcatccattccatctttgctataaccataagccatagcacctgtacccactgcggcagctgtaccaccaagtatccaaggaactgcgcgtttagcaaggcccattaaacgacctttagcgccacctttcataccaccgcccatcagcacgtcgaacgcaccagagccttcttcaccttctgtaccggtaagtttactgaagatacctttaagtccatctgacaatcccttcaggactttattttcagctttaccggtatcgccatctcccttacccttcaatttatccatcaagccagcagcgccttctttggccttttctgctttatcctgccaactaccagcccggagcttttctggaacttgtgcttgaagagtttcaagaatgcgacccaatagtacttgatcagttgtttcgaagtcttcgtatggtacgcgttcaaagatacgtccaagaacgttaccacccgctttagcgaaaccacctaacactttcttagctgcacctccatagaacttacccgtcttcttcaatgcccaacccatgtacttcatggaagcatcgatatacttcgaacgggcagcgcgaataccacgccatacagtcttacggatgatacctttattcttagctaagatatgtttggtaccgtcgtagttcttaaggtctttatacagagatggttctattacaggttcgcctctctcgttaaagatcgtgccatacacatcaccaaagttttcaattacgcgacctttatcgtcgaagtacttaccagcgttaaccagtcttcgttcgagtacaggtacatcgtcaccaggtaaataagcattctgagtttcaatcgcgaagttgaatagggccgaacccataccgatcgctgtcttagcaccaaacttcagtgcggaccacgctaaggtagatgtattcgttgccatgaacttggcaccccagcccgctacatttgctagacgccgacctgtcttagtaagacgccaacgtttacgagtagcacgcgaccatagaccagaagctagttccttagcagttgcaatgatagatccattcttatcaagtacatcacctttgatgtcttgcatcgaattaatctggtcaccatctgcgttgaagtattcgccgttctttagaccacgagcagagatagtaggttcttgctcaccatccaaataccagtcatgcttatcatcttcagctgcttgtttttgctgtgcgttttcaccttcagcaaactgttgagccggaggagtttgtccacccattagagcaccgcggattttgtccgctgcattgctcatgaaggcaggtaattcaagacgcattcctttcttatcaaacagaccttgggcaacttcagatgctgttagaaccgtcatgccagttgtagaaacaaccttaccggtaatgtcgtgtacagattcgatgatctttttggtattaaagtcaacaaggttaccttgaacaaaatcaatacctttaatgatgggttcatttggattaaacttcgtgaacacatcgatgatcttatctttctgaccgattgcatattgggttggatcattctggaactgatccatgtgttctccaaacttagcacgagacttagaatagagatcttgacccataatacccgcattattccaagctccttgcagaccagctacgtaaggaccaaattggccatttcgcatgttgttagcaaagtcttggataccggcaccgtgtttattgttcaggtactggaatttaccttgagcaatacggctatagcgcgatagttctttcttgattcgatcttcctgtggagcatgcttattccggaagcggtgcattgcattaagcgcattggctttagctgcacctgggtaagcaggaccaaagaagttcttatcattcatatcaccagaagcttcaggttgatagtcaccattaacccatgggttggtatcagtaacgccagagcgcatgatctcccaaatacggttatagtttatcctatcttgtccttgttcagtaatgatgataccgagcatccgtaaaggttcagtttgaccagcattaataagacgatgtacttctttaactgggtcacgacttacagaacgaatatcaaggaaggcacgagagtattcatcccgtagacgatggttttcagcattatctgccattttacctttatcgtcatactggaacttactcttaaagaacctttgaatttcatccgtggttgtggcatccaagccatccatataaccgccggatttaaggtaagcttctggatcaaatctacggtttgtagatgcatcacgaagcatacgttcaccaagtgccttacgtgcagctggagaaagtttaccctcttcatccatcaagttcaatgtgtcattaatggcaccactcgcacttcgaattgctgctgctggaataatcttcttctgaagacgatcatccgacagcgattgaacttcgaatcgaccagttgtaatatcgaatacttcacgctcgatatcatcgcgaccagtgcgaatcattcgcaattcttgaagctggcgagacaggtaacctgggatgacttcaacgatactacgctgcgtcaattggttaaaggccgcgccttgatcaattgtttgatagtttccgttttccaaacgatcgttcatgtggtactgaggaacgaatggcataatagcatcacggataacgccacggaaaccataagtgttttggtagttattaacgaactcttgtagatatgctggaacgttgtctagggcataccctacctgatgatggcgtccaccaaaacggttggatagtttttccatagtcggacgaactttacgacctgcccatggaacaatagacgacttaaggatatcggcaccgtattcaccggcgatttgaccagcgaacttatagcgattatcccaaacggatgaaccagccatatcgcccatgcgtagaccggctacgatctccgatagacgtccgcccaggccgctggcaacacgttcgtttactttgttaccataactacccaagaagccatgaaggccctgtgcagctccgccagctaggcgtccgagcatgttgccccggccgcgacctgaaccaaaactggttagatcgccaacattgcctttcttgtagtctggtaagccggtattacgaactaatgcttcataagccttattctgcaattcaagattagcttcttgtactttaacaagatccctaatacccatgtaggtacggaactgaagttcaaggcctttacgttgaattccataattaacttgttcgttatatcctacaagacgagttagactatctacagccatccccatcgaacgggacataaagtcaaagcgtccagcacttactttatcacgaattccacgttctgctctttcaacggcagcgcgggcaactgcaccctgttcactacgttggaagttttctctgcttaccagcgtattctgatcgagagcagctttaattacatttgcatcatcattttcttgccgacgacgacgaatagcgatttggtccctttgggaatccacttcgtactgatattgttcaacctttctggtgagcgtatcagagatattttcgtataaggcatttggaatgcgatcttttaactggggtagataatcctgtgctttacgaccaaggtaatctaggtcggatgcattgactctttcgaccgtatctttgatatcggttaccgaagccattacatcatcataggcaccaaaaagacgcgcgaaaccatcaggcgctgcgcttcgtaagaaattccttacgatgtctttggttttcaatccaccgaggaagccctctttcagaccagatttgaaatcggttactggatcaccaggtttggtggtttcaccgacatcatcaaacaggtcgtccagctcattaaggtcaagtacaccaattctgttctgggcattcatcccagcaggttttggcagcttggtcttttttgtagccatggtcaactccatcgatataaacaatcatatcgtttagctttttgtaacccctaagaggaaatttgaaatgaagaaggcactagtcccattcaacattgatcttttgattccgacccaagcacagctttcgatgttgggacaagtaactagccacgagatcttcgaaggtaccggtggtaactttcatgagaaaggtttattctccgtagagattttcggacgagtaggctctactgaacgtgaaggtcgattcggttatatcaacatgggtcttgagattattcaccctgtgatctatcgtaaccttattaaactaaaggctttctacgaagagatcattcttggtaaatcattcgctgtatttgatccagttgctaaagacttcgtacgttccaatgagcttgaaggtaaaaccggttacgcctttttctttgataactggaagaagatcgatttcggtgaaactaaatcatctattcgtcgagtacgggtagagttgatgaagaagtacatgaaaaactgtacattcaaaaacatgctcgttattccagctgcatatcgtgaggccgagattgatgttgatggccgtgtatcgatggacgaagttaacgaacactatcgatatctgcttaaccagtcttatggtgtccctgaatatttcggacctaatgacgatctgagtatttatgatcgtaagcgtacttcgatgcagttgactgctcttgcgatttataaccattacgaaaacctattatctggcaagggtggttatattcaacagaaatgggcatctcgtcgagtatttaatggtactcgtaacgttattagttcgcttgataccaatgctgctgatcttgatcagccaaaccgtcctaagttcaaagatgccgtaattggtatttatcaagcagctgtatccgttaaaccaaagactatttaccatttacgcaatggtgttgtcggtcaagtcttcgatagtctctctactcgtgttgagcttatcaataagaagacattgaaactggaatgggttaatattagtaacgaagagatggacctatggggaactcccgaaggtcttgaacgcgttattggtgaactaaaggtcatcgaaaagcgttctcgtgcaattgagatcgctgggcattatttggcattggtctatcttgatgacaagcaaaacttcaagatttttagggatattgaagaaatgccgaagaagctcgacaagaagttcgtgcgtcctatttcctatgctgaattgatttacctaagcggattacctatgtggaaaagaaactccgcattcgttactcgttaccctgttgagaactataacagttctattcctgtaaagatgtacgtgaagacaactgttaaaggtgagatgcgctacccacttggttgggactgggaacgagatactaatgctgagatcgcattagaatatccaatcatcactattaacgaaccggcgcaatggcatgactccacgtctatttccccgtctattcttgctcctcttggtgcggacttcgacggtgataccgtgtcattcaacgccgtgtattctaaagaagctattgaagaatccgatcgattctttaaatctcgtttagcttatatcaaggctggtggtggtcttgcattcagtgtcaacatccacacgcttaatctaactctccggtatatgactggggaaccgaaaagtaggatttaaccatgcgtttgaaaattcatcagtttctgaagaattacagtcttcgaaactcaggcgaactactgcgtcctcgtctgttcccgttgacgaagctagagctaccccaagaggtagtgtatcagttccttgatgacaacgctgctgtaaagggtccgagtcaatcggaccccctctttgctaagttgcagggaaaggtgttcattgaacacattacacagctagaaacactcgatggtaacgctcggcgtacttctcttattccgactacccttgaagctgatttccgtcgccaacaccgtttcttcaaaccactgcgtaaagatgcggctgtaaaactcaatattcaaaacgttgctgtgtttaactacagcatgctaaacccactctggaagtaccaagctaatttcaaatctaactggtatcgctggagtaacaacaccgctaccttctggaaaggtgttgttgatgtacataaacgctttggttggaatcagttcatcgaactccatattccagaatccatgccaacgtttaatgaatttaagatgttagagcgcggcaccactcaggcactacttgagaaattccgtactaacgctgtattaaacgttttcgatctttatcgtttccttggtgataatcgatcttcgtcttatatgtcgatcgtacctaaagaagcttatgaaaagattaacttcctgattcgtgtccagaataacttctttgttattaaccttggacaacttgaagcatggcgtgatgctccagaagtaatagcagaacaagagaccgtagctactgaaagttttgtggatgaactcggtcttgaagttttctataaaccggatgtaatgcaacgtcgagttatcagcctgttgactactttggttgagttcaataatggtaacgacactctaatggaagtcgaacctgaaactccaaagatcactgacctgatcgaacctgaagataaggttgacacagacgacgaagaagtcgaagaagttacagaacgtgctgaagaaactgaagaagctaacgacattgatgcgatcgatgattccaatgcaactggatctaatgttagcacattactcgatctcgggatgctcgaagttgtttatgatccaccgcctgaatccgagcttgagaaaactactctcgtcatcgagaaagatccgctcgaaacggcgccgatcaataaaacaccaactctcaaagtagagacagccccggtaactaaatcggtcgtacctgcttttagtagcggtgacgctttagtagaccctgttggacaaaaagcatttgaactgtatcaagttggcatgatctctggtcgttcgtttgaacaagccgttgatgatgcttctatgtacaagtctattcctgatccatttggatctggtaaaactatcgctgaggcgatggtttatgaagaagaagactttaaagtaccagtcgaacagttcgctgataaatccacgattactgataaatcgatgttgggttctattcacaaatcgatgatgcgtaagtacacgaagactcttctacctaaagacatcatgcaatctatcttgtctgttcaagcgcaaggtgttgcagtaactgatgttcgtatggaagaagtacgtgacgcgatgaaccattatcagtcgttcactgtaacagtcaagcctattcgtggccgaccttctcaactgcgcttccgtattccagttatcgatcgcgatggacgtttccgttctaatggtgtaacttatcgtcagcgtctgcaacgtgcggatattccaatccgtaaagtaaacccacttaaagttgctctgacaagttattacaataagacattcgttacacgttctgaacgagcagaaaacaactacgatacttggttgattcgacagattggtgttagggcaagagataataacgatgtctctgtaactgaggtgcgttatgcagaactagaccagtctatgttcgttctaccgcgagtgtactctgcattgggtagagcttatcgttctttcaagaacggagcaaatgagttctattttaagttcgatgaccatgccgaatatttccaaaagacttacggtatttcggtagaagcattagagaaagatgggatggttgtagtaggcgcccataatcggttacctattctagttgacagctcgtctcagttctatgttaaagaaggtaatgaacttgaacccatgggcaccatggtagatatcctaggtcttaatcaggttaaagctcctcttgaagctattctagtttcagttgctaacaaagagcttccacttggtttcattcttggttatcgccaaggcctgtccactctacttgatacacttggagttcaataccagagccatccgcgtggcactcacattagtgttagtcctgatgattatacactggcattctctgacgagatccttgtattcagtcgtcaagattatcgtgcgacattggtgttgtccgggctgaaacgttaccatcaatctttgaagaagttctctcgatgggactttgaccggcgtgatgtttacttccgtctattagaagaagctggtatgtctgcccgatacactcgtgaaatcgatggcttgtttacttctttcgttgacccgatcacaaaaggtcttctggaagaaatgaaagagcctactgatttccaagggctactgtatcgttccgtagagttgctaactaatgactggtcaccagcagaagtagatggtgcatatatgcgctatcgtggttatgaacgcatggcaggaactatctacggtagtctgaaccgcgctgttcgtatctacaacaaccgtgaaggttctgcggatcaacagatcgtgatggaccaacacgaagtttggcgtaagattgcatctgacccaactgtagctactattgaagattctaacccaatcgctaacttgcgtgagcaagaagccatgacttatcgtggtgatggtggtcgtgggtcgacttcaatggtcgcccgtacacgtatctaccatgaatctgacgtgggtgtagtttctgaatccactgtagactctggtgatgtgggtgtaatcgcttatctatctcctgatgctaacttcaacagcatgcgtggtacaactcggttgtttgagaaaggtaaggatggcgccgctaagatgctatctaccggtgctctcaccggggttgctacaacaaacgatgatccgaaacggattaacttcgttagtattcagcaacagcaaggtatctatgcagatggctatgaggtaactcctcttcgcactggttatgagcagattatcgctcaacgtaccagttcgatctttgcgtctgccgccgaacaagatggagaggtgattgcagtagacggtcatggcattacagttaaatatgctgacggtgagatctttagttctcagcttggaaccgtccatggtactgctgcgggtgtaaactatccgcatactctcgttaccacacttaagaagggtgataagttcaaacgcggtgatacgcttacttttaatagtaagtattttaccgaagatcgttatacccctggacaagttctttggaaagctggtgtcatggttcgtgttgcattctgcgataaccttgatacacttgaagacggatctgttattagtaaagacgtggctattaagcttaatactcagacaactgacatcaagaacattactgttcgatttgatcagtcgattgagaatttggtcaaagttggagaacacgtagacttggattcaattctatgtactattcaagaccccgaaatggccgagaactctctgtttggtgccgctgctattgaaacactgaagaaactttcggctaatgcaccccgtgctaaagtcgtagggaccatctctaaaatcgaatgttactatcatggtgacattgaagacatgtccagtaatcttcagaagatagccagagcatctgataaagagagagccgatagggccaagtcgttgaacgaaccagaattcacaggtgaagtcgacgcatccttccgtgttaaaggtcaaatgcttgaacctgacaacatggttatccgaatctacatcgaccatgatatcccttgtggtactggtgacaaaggtgtagtagcgaaccagatgaaaactgtattctctcgggtaatggatggccgtaacgaatgtgaagacggtactccgattggtctgatcttcggcaacacttcggttgaagaacggatggtcatgtcccctaaactgattgcgaccactacaatcttgcagcaagctctttccaagcacgtagctgctctctatcgaggaaccacaaatgcaaaatcaaagtaacaacgtagtactcagtcagaacatcgctgttctgactgctgctgccgaacttggagccgaagctttgcttcgctccatcggcggtgacacctcggcagctactctagaaggtgagtatctgaccaaagaagatattcaggcagctatcgttgcccgtatgtgcaaattcctcggttaattaggagtcaacatgtttaatcccgaaactctggacgctgttcgcgatgcagctcaagcattcactgaacaggaacgtgttctgacaattccgaaccccgagttccctctagctgtatatgctgacggtttcaactgtgaaaccgaaggtaataaagttgcaatgtccgatgaactggctgcttccgttgaagctcatttcgtcgaaagtaacgttgaagcacccgagaacgttaatgaagaacgtgaagcgatcatcagcaatatgcatactgctattgccaagattcaattcaatactcaaaacgttatcattccggctattaaagcaatggccactgactatgcctcccgtcagaacgtaagttctcaagcggattgcgatgtcagcactttcaactacgacccgattcataacgatcctcgtctagttaaccacatccaaactcgctatgctaaagtgcgtcctctaccggaatatcgtacctttatgcttcgcccggttgatgctgctaccatcatcgagatggtatccatcaataacccacacctggatcaagagcaagttactgaatgggctcttaagattccggcacaacgggtagaaaacgtttggagtgaactatttggtactgcacgtggtttgactgtttctaacctgagctttatcaatcctaatgctttcccgtttaatcttgatgaactgactctagcttatttcatctgtggtcattacatcgagaacccacaagaagtacctggtgaatccgtaacatcggaagaatgggaacaaacggttcgtctactccacgagatgcttggtttctacatcatccgtgcgtatgaaaatcgtcttgaaatgcgagagtctaatactcttgtacttcgttatgaagctcatcgcccagttgaaaaccgtcgtgtacttgttactcttaacggtgacgttgctgagagctggctcgttaaaggtggttctgttgaagctctgcttggtgcagctatcgacggtggtaatgtcgtacatgcacaaggcattgacgcacgtgctgatcattacatcaaacgctggaccgctacatatccgctaatcaaacaagcagcactcgactacgctgagagccgtcgtcggcaggacgttattgataccttcctcgcacactgtggtgaaggtcctttacgtgaaatgaatatcggtaacgtacgtgaactactggctaccgccatgcgtttcgttcggcgcgaagatctggataatccatactgcgtattcagtaatcttatctgccgtacttactacaccgaaccgatgtataagctgtatctcgatactatcgatgaatatggccaaaacttccccggtgcagaactacgtgaattgaatactcaagctctgatttcgctgattgctattttccaagcacagcagatcaaagtagaaacattcaatcctgatgttgatccgaatgcaactcttcctgaaccagaagaagtgccagaggaaatcactgaaccaactagtgaagaagttgccgatgctgtcggtgatgcagtagaaggtgaaggtcccctggctgaaactccggaagtagaagacgaagaagatccttacgctgatgaaactcctactgaatctgagactgaagaagtcgaagaagagcaggaagaagccagtgaagaagaaactgagtctgaaactgaagaagaagaacaagcataattgataacctccggtatccttcggggtaccggagtgtgtcaactttcctttttctaagaagagacttatatgaacgttatgcaattaacacgtgatgctgcacgcgtaaatgcaaatctgattgaattggaagatggtggtattgctacaaaccttccctgtaagattcaaattccagaacgttttgctgctaagaacttggctgtattaggtagtgaagtattcatatttggattctttcctatcatcatgaatgaagagttttacgcggttaataatacaatcgcgatgatgcgcattcttccaaactctactgagcgtgttgttgtagagagtgaaccttattacgaatttagtttcgagaaaggtgataaagttttctattcgacacatcttgtggtcaacgacacactaacatattacatgtacgacgagttcgtatccaaagggaacatcccttggtatatgaactattatgacatggcgaaaatgttcgaaactgcaaaagaacatgcagatacatttattggtggtcgttcgattatcgagcttatcatttcaaccatcgctcgtgatccggatgatatgacaagactataccgccacattctgtcgcggcatgatgatgttaaaaataaacctccagtaaccgtacctttccgatcggttatttggaacacctcagataccacctcaaaacttaatggtgcttacttcagcgacgctatcaactctgcactagtgaaccctagtgagaaagtagaagtgattgaagagctattgaggacataacacggagttgcagaaatgcatcctttggcacaatcttcttttggtgtccaaaattctccgcagaatcaggtacgtattggctgcactatgttagctggtacggacaaaaaaggaattcttgcgccgaatgcggacggttattatactgtagttctgggtgcctatggtacacataactctgctggtatgttctatgacgaagccagtggcgttgcgatgtttgatccgaactcttccctgatgcgtcgccttaagaaaggtgttctcttcatggagttcaaacaccctgaaccgtttacagacctgatgattgatggtcgtgttgttcgtcaaccgatggatgatcgtcaatacctgcaacgtattcgtatgatcgacgataaccgggtttgtgcacatatccgtgcattgactattgttcccggtaagaatgaaaatggtaagactgttaaaatggtcgtcggtgaggttaaaccttacggtccgtttggtcacatttttaaagagtctttggataacccaagtatcaatacctattgttccgttcgttctatcacacaggacgacgtaatgcgtggtattaagtatacacgggaaatctccacctgggacttcgtcggtgagggtggtatctatattgctaacaaatatacctcccctgctttggaaagtttctccgataccgaagttatcatcacacctgctaccctttggaagatgcaggatgaagcacagaagcgtgctaatatcggtatggaatctgatcctaatctagacgttactgatctaattcaacaactaggttggtcgcgtaagaagccgattcgtgtacctgcttacatgcgataaaaaaaaatggaacataaagccctctcccgaaggagagggcgatatgcctttatgctacgaagccataagcttcttcattaacaggtggccaacggactaactgtggtttaccattgatctgttcttctgttacatcttgaccgtccaggtagactgatctcccgaacacaccttgggttataagttcacgagctttatttaaagcaagtttatacttatctaccgaattatatgcgatagtattactcacatcatccagtgctaaaccttcaggtgtaaggtaatattcccgcccttcatctaccgagaagattcttactaatcttcggaagttctcgttaatgaaaggccattttttcataggtttctatcccatgtgaagaaagtctgagtttaaccgaatcagacgtatcgcaaactgggtgagatgctcgaacatctcacccaattcacgtttgtaatatagttctcaattaagttagattaagacggcatattaccctcccttttggggagggctttatgtcgctattgaatagcagcatcaggatagaacgacttgatcagctctattgggttttccatcttgtagaacggagctgtcaacattgcttcacgatgagtttcactactaagaatcaatgtggtcgcatcttcagaagcgtgacttaggaagtaaagattccacacgggttgaccctggcgccgagtagtgaaccaatctggtttgagttgattaaggatgcgtactaaagtagccatttggtcggcgtagttaggacgttcctgtgcaccagttggatctgggatctcaggtccagttggattattcgggtcaggaatcattttagggaaaggaccaccaggtacacattcttcagggaacacgtaattctgtagtaactgcgcaggaaaatttgggttctcagcgatcagtgctgaaacaccgccatgcagcattaacctttcgattgtggcaagatcagtactagggctaatactagcagaagctcgcttaacaacagagaatctgaaatcatcatcatagtcgtattcatacttgttatccgtccacttggctccaaaggtttcatcaactagatcgggtataccccaagctgtaacctcttcgataatccctttcatcagtgctgcttcagcaccaagatcgaatacacggagcaatgagttattagtcaggtcacccatgaacccaataatactattaactccgctaaagttcccatctttaaaataataatccttttggttgagaaccattttaacgccatcgatcatatccgttgctttacgaacataacctgtaccggtatcttctccggttaactcttccataatcgatcgttcaacgtccgtagctagacttacaatggaactacgtgacccttttagggcatccgcaattcgtgttctagccatgttgagatcaataccgttgttaaggatcttgttaccgatacctttaacaacaccaagtgatttttgaatgagttcgtctgcacctacaccaaatgctgttaccttagaggctagctgattttttaattcagcgctttgttctgtataggcatcaacctctttgacagccgcatctggtaaaccagtaaatgaagggatcgctaattgtaccattgaatttcaccaaaaaaaataagagtcatacaatgattgccattaggctctccccgaagggagaacccaaggcagtcactttacatacttgaagcaacacgtttaacgatattaacccattcttcttcagctggggtaataccgtgagcacgccacacaatctgtgtgtttttattaagtttaagttttaggagggggtacttggcaatgcacacacgaagagtttcctccatcttttcgtacagatctggaacgaacttgtatctactttccaccccagcttcttcaaggttgataccatctagatatttgggatgaacctttcctgtaataagatacaaacggaaaccgttccagctgtaaaaagctgttccggtaaccgtatgtttcaacacggatgaatggaactgaaggacatcagggcaaaggggagagctcaggtcaatacagttatccattctcttactccacaactacagggtcagttatagtgatcttgtgaacagagtccggaagtgattcacggacaactggatcatcggaccaacggagggtcagaatatattcttccttaactgcgcgtagcaaatggatgccacgacggaagttattcaaagataccctcggatcaagcagagcacgtcgtaacgtgtttacattttggttcacttctttctgagtcaatccaactacattaacgggattcttcgtgtaatcatcaaaaagcttctcccaccagagtttaatatctggtttatctttcccttccattgcaacaacgtgcctgaaaagatgcgccatcaatgtacctgcgggtttagcattctcgaatatcttacaatcctgccaagggaaactgttggtcgtcagaacatcttcccgttcttcgggatccatcgtgatgacatacgaactaacacgatcgtcacgccatgtcagtttaatctccagtgttgcgtggactgggttcaggaagtcaattgcttttctgaaagcggaccactgcatcgtgtctgacttaagagctttattcaggttacccttgtcttgattatttttattccaaggtttctcaaagaaagcttcttgccgccggttccatgtacgttggttaatcttacgccacaatagaacttcacgaaacagataacacgggatatcggatgctcgcaacgttcccttaagggggtcggaaagaaggtcttgtacagaatccatttttcatttacacctacggtgattaaagagaaggtttcgtttcgcaactctatttatttcatagtttcttccttcatggtatcaacaagcgtttgggtaagtacaaggatatcatgatacactcttcctaaaactcttctatagaagctcgcggtttgtgtttcaagaatcattgcatgtttatcaagatacgtcttaagcttttctaaagagtcgactatatctacagaataacctcttgcatcagcaaagtattcatctaagttaactctactgaattgagtgaattcattcttactaatttgttctaaagctgcttgatcgccggtggataccattgtgttaatgacattcatctgttcaatcagataagttacgttagtatgtcgcagctccatgtttactgccatcatgtctctaggtgaaatttcaccgaagtctttgacatcgattctattccataattctgcaagcatgatgggataattatcacgacgcacgccctcgtcttcaaactgatcaagcagtgctgaatacagttgttttttggatactggctggaacacccgtaaccagcggcgtagcgtattaatcatatagaaaactccctaatccgcattttatggcatattgttattccgttgagtatttctcaacagtgaggtagtaaaatggaaactccgatcccggaatttattccgacagaaccagaggttttgtactctgagctttcttatgaagaccagctaaaacttacacaaaacgttaagcatcggattcttcatggtgtaatgacctcccgtgtggatggtactattccaaccgacaaagaatctattgattcgatgttgaaagttatggactcgatggatcgcacgactatccagaatcgtcgtacacagattgaagcagaaggtaataagtctgcacgtgatctggttgaatcgatggcagagttcattaggcaagctaagaacaagaacccgttcgttgccgtacctggtgaagataaccgcggttcagaaccagatatcgataatgaagatcttggtgagtttgaacacgccgccggtgaaggtgaaattggtgtcattaacgagacatctgaagagttcaacgaacgcatgcgcgcggttgctgaaaagaaagcacgtgaggaagaagccgcacttggtctctcttaacgacatattgcccagcctatggaaggctgggcaatatgttgtcttaatcaacaataacgtcttcaaatgtaccatactcatcgatatggatttcgacggtcggtggttcaaattcttgcattgtcttacggacggtttcttctgtggttttgaccagatcgtcttgtaacttttttgcaaagagtacactacctgcaacgagtgcaattccagcaatagagcctttattctgatatgctagttcaaccaacggatttatactttctttaaactgttcaaagaaacctttcttacggggtttctctttattgtaatctttcagcttaaaggtatcgaataccattggcatgtcagggacttgttcatatttctggagaattgctccaatatcaacaataccttgtgcaaaccaaccaaatacaaatcgattagtttttactttcagaacgatgttatcgcctgctttatagttatcacggatccaatcaatgatagcatcatcaactagatcatcttgtcctttaacttctaacaatacatcgaggtctactagagtaccatcgatgatagtatcgtttacactgtcaacttcttcatgaagacgaagtacggtgttgattaattcggattcggttaaaccggttgtttttacagtccagtagaaagggatgttgctcatgagtatttacctaggtctatttaaaagaactgtaggataaaagaatataaagagtcccctcattattcttagtcctacatatccttacctatcaggtaaatattcccatgaacaaacatcactcaaactacttattccacatccgatagatgtggcaacttgttacagtaaacattgttcccatgaacaatgctgccatcaattcactagcactctcctcttctactttcttttcattttgtttcaagtaatcataatactccttttgttcttcttttacttcagtagtatcatctaactcaatgccagcaagtatacgccattcgtgatcgagtaccttaaattcagaaaggattgtttcagtgagttgctctttaacccactccccattacgtcctctatgaagacaccaatactcgcctttctctttacagatatgtctttcagtaccacggtaatagaaacggaaatgttcaatctgttctcttaccgaatctatgtacaacagatccgttaaatgatcgacagcaaagtggctcctaaggacctctatgctgcggtaagtcattctacgttgattggagttgcatctgcctcatcgacagtagtttcatcattctgattagtcgcgaatagatctcctccgaatacgatggtagcaccaatgaatacgccgatgctaatagcggtcaaagttttccagttcatgttagtcacctctttaaacgaacggtatccttagatacggctcaattaggtaatatagatctgaaaaaaattttattgacataaagccctctcccgaaggagagggcatatgcctatttacaacttacttgaagataccagctttgtaaccttcaacgaccgccttcgcttccgatacggacagttcggggatattgcgacgaagcgccaccaccgctttgatggtgtgttcggtatcggcaacctcacgccagtcgcccttaccgttggccagctctacgtcttggacgtacagagcagccttgagaagagccatgttacgttcaatcgtcttcatgtccatctccacgagctgttgcaggtgagacagagacatatcggacgcttcacgaacatcatccatgaacgaacggttgtcggcgttgttcaggatatcgcgagtgagggtagccagattaccagccgtcgcggtcaggttaacgaggtggccagcgtatttctgagcaagagtagtcattgtatattcctttcgtttgggttgaatttatgttgattagaaaagtgccgtacctttccactcgttatcccgcgggggagtaccgaagtgttgagtgtacagatcgatgaaaacaatacggtagacgtcaccgtattcaccagtgcgaagcaagcgttcaatgaaagaggagcgccccatggcgtctatgacgttttgggtctcagagacctgacgatgcagctctttcactatcgtgcgatatacagcctttttggcggcttcctcggcctctttacgacgacgttcctctgagacagcaaaggcttcaccgtaagtagctttaccgaaaagaatatcgcatgcttcggaagccgacatggaattgaataggcccgatacagctgcccatacgccagtcggtggagtggacttcaggatcttattataagcatccagaggaattacgaactcacggaatttttcatccgtaaggtccatcattttccaggtctcttcattggtatcacgttcatgatatttccaaccagtggagttggaagccgatcgaaccaggttcatcggaaccctacggtggaacataggtacgtgcgcgatatcgataagagactggttgaaccttcagaagaaatcatatccagcgaattcttgacgccataaacctggcaaaggaaatcgatggagtacgttacaccaattgctacgtcacgcgagagatctttgttaaacatgaaatgtatccttaaaaagatgtttgttagcaagtacaatgtaattgcattctgtatgcagtgcgatagtacgatctattgtgtggagaaggtctccaacttcgtcgtcagtcagcgtacatgtccattgagtcaattggatgtacccaccaacatcctctttataatgaccgtaaacagtagcatctggtcggccattacgcattacaaagatgaaagcgtcaccactgatatcaagatcatagtaatgcccatgctctgatctcagtgtaacaaacatccgagcgggacaccctttaataaggcgtatacgcttagctaaccgattgatactgtctacgttaaacatgactagtccttgacgttaaacgtcagcgagaagctcttcgtagcacttacctacattcatgtcatgataatcttgttcagtgagatcctgaccagaatcatatttcatgaacgcgtgcaagtatgcagttgaaacggagcgagtgttaaagaacttggcatataccaagaacttatcgaggtcttctttaggatcgatactacttactgcaaaataagaaaggtctcgtcctggaagagtctgctcgaagcgatagattgctatcgatttgtttttgtcaccatcacggtaaccacactcaaggagtacattggtttgaatattcatggtaatttccttttacataggtaattttatcacatttgtaatatagggtttaaaatgctttaaatgtaagacaacataaagcctcccagaagggaggcgtttatattaacacgatgctcttaggacgtacgatgaactaccaactatagccttcaacagggagcgccagagttgtccatttaaaccttctaggagctccaccttaacaccttcttcccattctactacaaggacacgtgtttcattgatcgccaccgtaaagagcgttttagacctaatatgaggtacttctatacgtagatcccccaacaacaatctcgcttgctctttaaacacatattcaaaccgactagtgatggctgaaagatcatgtcgataatgtggtataagtaggtaatagaagttatcgaagatgatctccagcaactctactctctctttttcggtcatttgatagactccaaacagattaccttgtactcacttgataactacgttcttgttataagcttcaggtacggtgatattagttgggttaataacaactacttctgcattattgaaagcaccatgagtagactggaagtggctgataaagaacacttgtttaaattgaccgttctcgataagacgagagataaacgggattaagtttgcgcggtgttgttcatcaaacgtacgaccaaattcatcaagatacaatggcatgtcttcaagaccgaggaacttcagaatagccatcttgaatgcaaagttaacgatttccaattgactatcggaaccatacgaaatgtcaggtgccattacttgaccacctgctactttgagagggaagttgtagtctaactcctccttttcaactttagaaggtagtacttccattgggtatgtccacacctcgtcaatgaatgcattgacaatgtaagtaacaccctgcaagaagccaagcatatatcgacccaacaatccgccgtttggagataacgacttaattagaataccaagatcgctatgtacttcagtagcatttgttacttcgttttcaagcgtacgtatggtcgtttcacgttgttccatctgtgtgagctgtcgcgttgtttcagcgagttttacctggatggttcctatctcttcggtataggctctatcaagcaaatactccgaatgacgctctactttatctttccacatttcataacggtccaagacatcatggatacgtttattgttacgtagaatagattgttcaccggaccgtagatcttgcatatactgattgatatctgaagctttaacatacatgatgttaatttcagtttccaattcttcagcgcggcgtttcatataaccgattgcatcttggtctatctcagcgataactttaagacgtttctcgatattagtagcaagctctagttcagtacgggatttgacataactccgcatggctgtatgccattgcaaagcatcagtcttatgcaatgcaggagtccgatacattgtcatgttagttgcacagtaatcccacagttcattaaactctgggtagtctttcgtcaaagacatgtactggaaaacataacttgaatagtcctggaatttctcaagatattcttcgttctctttttgttctgcttcgatacgatcgatagcttcgtggagtttaactttagaagcttcaagcatatccgtttcagatggatctacgccaggtttaaattcatgggtacaagatggacataccacagattcacaacctttcaaacgcgacaacctggaattagcctgctcgattttatctgagacttgtgcgtaaatattcctaagctctttctgacggttctgtcgtttggttgcttcttcccgattcatccaaccgtcaccgttatcagggaaactagttaacagatcaaaccatcggtcgaacattccatccaacttacaaataggatcagcaccggctgtattaaacttaataattggaaattgaccagtataagttttcatcgagttaatacacgattcaacattcgccagattcgcagcatgctgttgtttcaatgcattaacatcatcttccgatatttcaatcgccgatggagagttagtacgaagcttttctagttcttctgcaagacgattaatcactgcattgatcgaagagtattgctccgatacccgattgaattctgcctggaattctccatggttagctacacgaatagcggccggtaacattggataatcacgtaggcaagcgcgtgcatcattcagaatagattcgagttcgttttcagcttgttgcacattctggaaagcaggtcgaacatcattttgcttttcttggaagagtttattcaaacgcttagtaagacgagaggtctcttcgcgcatcagtgtcatttcactatcactaaagatatcgtgattttcagtgactaggcgttttgtgattagatcgatgacacctttctgactgcgatgttcctgtttaatgtctctgtatacatctaacgcataagtcaaatcaacagttgacatccgcgtaagaatctcgcggcgctttgctgtagacatagcggtaaatttaactcgaccagttgcaatctcatggatttcacgcgtaagtccaaactcttgtagacagagttcttcttggattttatatgtaccgccgctattcaactcttcattatcccgtttgaaagagtgacgaccagtaccatgaccatataccgaatgaagtacataaaggcttccattatggtagcaatggaattctttaaaaccatctttatcaaagtttgtatgtcgagatggcaatggagttagttcatccataactgacgatttacccgaaccattagaaccgagtataatcatcatgttcttagtgggggtccattcgaagaattggatatttgccgtcataagtcgtttgaattttttcaaacgcagtagagtgatttgcattggtaagcccttaaaatcgtacgttaccctatagaactaaggttaccagtaattattcagaggaacatatggaagcttcaattttcaaattagtaagtattggtagagtagctgcaaacaaagaacgttcttcaaggcatgtggacgttttacctgtagagcttgccactggtactgatggtgaagtaacgtttgacccattgcaggaaacactacaaggtttcgatgccgagggtaatcagtataatgttaaagctactacaactagaacgactaactgtgaatggctaccgaacgaagacaaccgtgttactccaccagatgtacgtcgtaacgagatcgtagagatttggcgaatgggagacaccgatcagtactattggcggtgtatgggtcttcgtaacaatcttcgtacattagaatccgttgtatttgcatggaatgcttcgcccaaacctggtggtggtggtatcgattttagcacgtgttatttcatggctatatcagcacatgacaaacactggacaatcggtacatctaaagcaaatggagaacctttcgcatacacattccaaatcaatactgattatggcgcagtctatattaaagacgatgttggtcagcttatagaacttgattcaactgaacgacgtgtacaattaataaactcggacaactcttttgttaaggtagaacggcaatggatcgaaatgtctgcggatgaccatatcaaaatgaccgtgggcggaacaactcttgagctgcgaccagattcgattaacagtaatacgtctaatactacactaacgagtagtgggacacatacaactgtggcgggtcacattatcgaacaaactggaagatgggatattgtctaatgcctggtatagctgtttgtaatatagattctgctagtggaacaataagaccaagtggtaattcaactggcttctataaaggtaatccaattgctgtattaggtgatcccgtagatggtcatgggcgatccccacataacagcgcaaacatggtacaagcttcaacgaaagcttttattaaaggcgtgccaattgttctgcaaggaatgtccgctagctgtggtcatactgcaaccggtagacccgatgcgactagtagcggttgacaacataaagcccctaccattcggtaggggctttatgccgttatacgccttcagcttcgtaatgcttgatgcaatgactaatgaaagtcaaatacacattaagcgatacagccagccagtgagtatagaaacccattggttcagctaacttcttcgaaatctcgccgataatagagagaacagaattataggatttacctgcctcttcacccgcttcagcgatctgtcgaatagcgtcgtctacaactactttgaccgtggagaagtcccgctgacccgtttcagctttctctgctagagaaaggatgctggagatcaactgagtgatctcactaagagtacggacagaaggtacatcaatctcacgttcagaacggtcagctacatttagctgtagctcagcgaactgcattgtaaacgaacgtcttacaacatcctcattagcgactttactattattcaacatctgactgataacgtcaggtggtgtatagatgaacgctacgttgccaggtaggacaaccgaacgatggacacctttttccgcagtagtcagttctctctgttggagaggggcatgaccaggcggaggggtaaaatcacgttggaggatatttgcaaatgcttctacaacctcaccagctacttcattagagctagcatccttagatttatccaagatattcaggaactgtcgagaactgttccgtgcaatctttgcaaccgatttaggataatggttgagaatgtagttggttagatctttgatgtcgttcaagtggttaaggtctaaccccacgaagttaccatcaatagatagacgttgtacaccagctacagacattttctggtaagtagttgccgagcctagtttacctaagcgtcgactaatgctttcttgtgtgcgacgaacacgacgaatgctaccggtgaatttgacgtagaaagagttaagcaattcccagatgtagcggacaatatcgcgggtggctttcgccgccgcgataatgccttctttgattgctctcagagtaattttagaaccttctttgatatcaaagtcagggtcaatactctcaagggctaccgagataacatcagcagtagcccctgttacaacgtcacgtccagctagcagatcgcggtagcgctctagagaagaaccaagacgctgaatcttactcaggtcttcagatacttcattccattgtgccagataggacatgctttcacccttaggctttctcgccttcgataacatcaccatgttcagctttcagcatggcttcaataacagcgatttcagctttaaccaggttcagacaataacctgtaaacagatggttagcattagcagtttgacgagccagagtaatggcaagcagactggaaatagccgagttctcatcaccggtcatcagtgcaccaaacaggaagctagatcctttctggttaacccgttgggcgagttcattcagcttgctacgaccttcaacagctgcttcaactttattgatcagttgctcggtagcgcgaataacagaaactgcttcaccagcagacatcgttttgatggtatcggcaccaccatagctatcgccacccggaataaccgagaagttgatattaatagcgttgttgaagttgaaagtcttatcggctgcgtaatcggtgttcacaccaacgaacattgcacggttacccggaagaacttcggacatatgaaccgaggtgctattcaacataccactcggaactttatctttctcgttggaattaacgttcttgaatccacggaaggagttagacagaatgtcatcgatcgcatcgagcatttcaggagcgagaccgctttgaacgccgaagtagtaagtagatttatcatcaaacttcttcagaatttcagcaagtttgctcggccagttgatgagaacgatatcagcggtattctcaacacgcttaatagcttcaggactatcgccaacgaattctttaccaatggacagacgttgcagaccaccaatcttaatctgcttaccaccatcaagagtacctactttactacggagagtacgcagacgttctttcagtttggtagcatcttgagtaaaggagcgccagaagtccatcaatgcgttgaagatacgcatcagaacattacgggctgcttccagcaaagacttcatcttagcagtgagtttgctttcagtagcatcgcgagcagaagtatgcttatcgctgtcgtcaagttcttcaacggataccacggtatcagagaagaaatcaggatcaatcatttccagaccgacacgcatcgactcagccagctcgttagtaacttcatagccgttttcacgcatgccacgcaggataccaagataacgctcaacggaagctttggcgttttcaatgtcgcccatatccgaagcaatctcgtttacaacggcacctttggcatcagtagcggatgtaaggccatcggcagtaagagcttcaacagcttcatcgatgtcctgcaccatgtcgtcagcttcgccaacggattcagtttcaccagattcgatggtatcgagaccatcagtgtgttcttctacagaagtagtggtagcgacgttatcatcgtcagccgatacttcgtcatgtgcagaaccaacatccccaagaccagtttggtcaacggcggttacgtgattctcaacggtgtccgaagtatgaacattggtcacatctacagtttcggcagtaccatcgccaccaccttcagtgggacctggttcactagtctgtgtgttagtgaccgaagcatcaacatcatcagcatcaggcttttcgccctcatcactcttcagttgaggttcgagatctttcttgccttccagatccacgttctgatcggaggcttcagtgacagtaccagcagctttgttctctacttcttcagtaatggattcgttagagatgctacggcacagatcgaaaaggttagcgcgggccatttatatactccacaattgcgggggatttcatgagtttaaactacataaggttgttaaggcagcaggttgttatccttgatgattttctcaagaataaggttctgttgctttaaaatagagttggcattttccagttcaagtagacgagcataatccgtcgtacgattcttgatcttaccttgtcgtgctgcctcacgtgtttcgtggacggctggtgttacagcatctgacaacggcataatgccaaagtggacttctggattaacaccgatcgtatcactaactgcattcgcagcagcattagcggctgtatctagaattacgtcatctggcaatgcaccaagcgacagagtcatgatgacttggttgtatggcttagagctaagatcaggataagatttgatgtagctcgatggtacataaacaggtgggaatttaggtgacagcaacgttacgattacatgaccttgctgtcgatctgtcgcgacgcgtgactcgtcgattttccaaggcttgtaataaaggtcataaactgaacgaccattattttctacatcctcgaagtagcggatagcaccgcattcgtaaagttcagctgcttccaatactttatcaaacggaggtagaagaacatatagtccctttgtaccaattggagggaccattaaattgttagtggccatgtatcatactcactattgaattgtcatgtaattggtaatgaaagtaaagagtggctcggttaaccgagccacattcttagtattgacgctctatcagttctgataattgccagtaatatttgttagtccacttatcaataaacaatgtcactctgatggcttcacctgattcaaaataataggtgccatctggagtgagacttggataattagaacgtagacgatgataatcaccattactgtcttcgtagagtacacaacctccacttatgatacctgtcggaaagacgatatcacatgcagtaccagaaacataatcgctatcgtattttaaaacaataccgatgtcatattccctaccttcatctgagggattaccaagtataagaatagtatcgacgtatttagaaacatcgatcttgttaacggccattgtgtaaccgtcataactaaactgctcagggtaatcagtgatcagaagctggtttggtgattcaacaaagttccagcaattaattggattaatgtccatataacacctacatgttgttgaattcgtaatgtggtccacgcatgatccatcgaataatcggtgtatcttcatcaatccagactacacgtagaatctcaactccgttaccaggttggataactagttgaataccattccgtttaccaagccatctctctgggacgttgaatatgatcgaacgttcgctatggttgaaaactttaaatcggacacgctggtcagcaggcatatctggagtatccaggtagaagataaacgcgtcattataatttccattagctttatctttaccatcgaaagtaccaccggttaaaatcagtgtactactcaaaatatcctttctattgcttacagtctctccacctgcgccggcaccagaaagatccatggtgatgatctctggccaactaacacacatcgtagccatcattcctccttaaacaagagtttcataagtacgaccttgaccattgttgtatagccacgcgatctcttctttctctagcggtcgccagcataatccaacttcatctacagcaccatcaaacttggaatcactaaagatttctccgaactgtagaccatcataagaaccactacttggtaatggaatttctttacgtatcggattaccattgtcaacatagatctcaaggaatcgatcttttacttgaagaacgatgaattgccattctcctttacccatgtgttgaccgccagtagatacagtagtctctgtgttagcagcattgcgagagaatcctctccagccgttggaacctctgtacgataagccgtacttacagccatagtactcgccaaacttaccaagagtcaatacatattcctgacttacggttgggttatttactttaaaccaaccaaacattgccgtaccgctattatagctaccgaagttaccttcagcaccggaagcttttataccacttagtgcttgaccaactttaccaggtatcgtactttcagagttaaatccgaagttatgaccgccgtgtgagtctgtagcaatcccttccatggcataccaactaatcaagtcatccatgatagaactacctacagttttaccttgaacaatatccccagaaattgcccaaatccattgattggtattattatcccaaccgatggcagtaccacgaatagtcccaccctgtttaactgcgattacattccacgcaggcaagaggaatttattatgactaagtccctctggatcaaatgtgatctcatgtccggagttattgataataatccattcatgtccaggtacaagtgtagctggatcattttcatggtaggtaggccagttcagtgtaggtaccttctcaccctcaggaattggttcgagtacataaacacggttaccattctgttgtacactaagagatacatagtaacctgggttaccaaatgtaccagtaatgtaattagagatcgaaccttcgaagatatgttcatagaacccatctgtaggttcaggctctggaccaggaccatctccacctgaatgtaaccaaagaactagttcgccggtaaaatacagtgagttgtaaatagactttaataaccagttaggtccgacttgtccaccggtataatcgatagaagtatcgttaacccaaatatctgattttgttaaattcaaagtcgatttacgagccacttcaccaaggacttcagtagagttctccatctgttggagttcttcaacttcagaagccgtccagtatggattctcaataaaatcgtttaggttaaatcgatcgtaataaaaatcgtaaatagtgtcataagaagttcccttctgaataaacactactgtctggttgggtctttctttagttgctgctggttgtactctaataacccgagagtttgcttgggtcagacctaggctggaatatttagcgttaatcgctttataaagtccaactaatggactagcaccgatagggttatcggcaagtgaaatagaaatttgacgcatgtgtatcccctaataaaaggagagggtttcccctctcccttatgtttttaggataattcttctacgctagctttagctacaaccatgtagttaacgttcttaaagtatgcgcttgcataaatcacgttatcacgaatcatgcgagacaccccttgtggaacagagctatagcgagtcatcccttcggctgctttcagtagcttcgagaacaacatcatccattcaattgtttcaggcgacgatttattgatatccccagtatcgttagttactaactgataatctttaaatttctgcgagaactgtgtaataccattcctgttttgagggttacccaatacggagaaggcaatggatttgtatgtgttcgaagacagctcgaatttattgtctacgtaggtttgagtataacctggcccacgtgcagttcgacgaatcaaaggaagtcgtttacgatggtctacagtaggactgtaggtaccagctcgataatcggcttgttcgatagaatactggttccagaatggagtaaagatgaactcagttgtcatgaacaggtctggaagaataacttcccaatctgtccgtggatgtgcagagtcagccagtagttcttctacaatcttgtctttgatgaggtcagggttgttgccagcctcgccatagacgattgcaatccaataggcggggaaacgcatagaatcatcacggggattatggtattcaaacatgaatgcccgttgatgtgtatatggatattgtgcccgcttagcctgaacttcttcgatcttctcaacgagatcataatcgtccagtagctgcttaacaataagcggatctttaaagaaatcgtcatacggaattatcggatgtacgatctcgatgatgtattcgtcgtactgagctgcaaaggattcatctgcaagccagatattcatctggttagcttcagaaccaactaatacgaattcaacccattctggcatccaaatgctaccgttagaaatcatttgaccactacggaaactttgaataaccccattaaattctgccatcaccagttgacggagtacgttaggatcggaaccaatcgtaccagaaatcgactgttgataaatatattcacctagcttaagaacttggtctttgttgttaccggcaacatcaacaacgtttccatcctttacgctatgaaaagaaataaaaacaacgtttggtgcggacgtaccggtgtggaaagtcttgtcctttgcataggttgcgctattcgacgaaagttcgccgagaatcgctacagtttcaggtgcattcgaaatgagtgcagggaagctgtaaaagcctttcaaattgtacatgtgctatcctcatgagcgagagatcgatggtcttccatctataaaatcagtcactccgcttgtgcttatttaaaacgtcgggtatactaatgcttttaaacggttagtatattgtctttaatgtctattgatctcagccatccacggcttttatgggtaggcgcaatgtctaactgaacagaggaaatcatgctcagtttaactgcaaaagccttgctcctgttgtggcccttcctgaaacgggcgatcttcggtgatcgtactgtccgtgaagtgatgctggaaaacaagcacgttacgtttatgtttgcgatggtactggtcttggccatgtcgctcatgttaactatcggcgagttgaatgatgttaagtcagagaactggaagttgaaacaacgtccggaatgtgtatgcgatgtagactctgtcgaatcgcttcaagccaggcgaaagcttctgggtgaaattctgaaataacctttaatgggctgtaggtgaaccacatgtctaaaaaatatttactagtactttgtttgactctttctggttgcgttatttatgcaccgaggtacaccacacagactgtggttcagcaagagacaacttccagctgggaatttagccagccgcaaattaaaacaataacggaagtgaaagaacgagttatacaaacacctgtcacagaacaaaagcgtccgttagcaagctgtgaaccgtttgtactcccacgtgctgctttactccccgagaaaccgaacgaagaagaattagcgagtgcgcagtcttcagaagaaatcgatcggaaactctcggagtatgtagccgaacttcgtgcgtacaatgttgccgaacgatccaagatagagcaagcccaccaaaagtggttggatcactgtcaaagaaaactcgactgatttatactttagttaagagtctgttgacagaggtaaaaaacaatgtgcgacggtatagtgctatacacagatggatcattccgtcaaggtctagctggttggggagtccatggttacacttacaccaatacaccgatgaagtctaaagctgctacaaaacagcagccaactgcatcgggttatcaggatgtcggtgccgaggatacttgtacggttattgaatatatcgactccttcggtaaggtagtcgataatccgacgaacaacaccgctgagcttagtgcggcgattaacggctttaagattgcagatgcctctaaggctactaaactaaccatgcttatggatagtgagtatgtcagaaaaggtctcgaatcttatctcccaaaatggataaaaaacaattgggttaaggtagatggtaatcctgtagccaacaaagatctatggattgctctgaaccagcaaaagatggattggcttaagaacgaccgcaaactggaactcaaatgggttaaaggccattcgggagatataggcaacgagaaggctgacgtcaatgcgctacgcggaggcggtgcttcggttacacctaaaacagttaaggttgaaggcgatgccatcaacaagctgaaaaaagttcagatgaatccactgatcctggagtcccgtctgctctttggaattaatagtgggaaaccctcggatgggacctactacatgtacaacctcggaagtatgcataatgcgggccatcgtcctagggatactgccaaagataaattggccaaagcagatttgctacttgggagaaggatttccgaagcaacctttggagtctataaatctcgggaacctgacgagtatttagagaatctaattgagctacatacgaaagcatttgggactgacctcccagaactcggtattctcaatctgggtaatgcttgtggagcaaagcaacgccagcaaatcgaatcacttgggcttgatgctcttgtacgttttgatgacatctttgttcttgcaactccagatatgggtctcattagtaggactctcaacccaccacgtatggctaacgatgcggtaagcatgtttaacgtgctggaacgtcgtttggcggaatacacggcgggaacgataggagagtcggtttataaaatcgacattaccgatcacctgtatgaaactgtacagagcggtaagaagacggtaacccaacttaagaagtctatcactcaaaatacaccatatctcgatattcctatcgattataaaggacagaaggtatcactccgattggcattgacaatcgatattccttctcgtaaccaactcgctcgaatcagctgcgagggtgttaaagtggaagtactgattgtagctacgggtccgttagcctattcatactcgactgtgtttgtaactgatgatggttctgccatctatgaagcaccgtacacacagttcattttgaaaaaatagtgggtaactcatgagccttattagcagattcttgaggctggatgaaaatccattcaggacattctgggttttcatctggaatcacctggataacggcttcaaacggatgtgcgtaatggcgtcattgcatgccgcactggtgcagtgtcgcgatcacgaatgcgagcggatatcttcgcttaattcagtgatgcgtctcgtgagggatgaaagcgccttacgcttaccaacgttatttggaccttacgtttggaaaggtatcctccctatcgagaaggttgatcttgaatctgacaagtacttcgaaaggatcgctcgaaagactccctgctggcttctatatacagacaaggaaactttcgttaaagaacttaagcaattagtacaccattgcatgaaggaacgtcaggcgacagcttaacggcataaagccccaccattaggtggggcaatatgttgtcttacagagaacgaagatgtttctctgtttcagctaagacattattggtttcaataattcgtgtcatttgaatggagaaccactctacccacttagctacttgggttagttcctcagacatcatcttagcgaactcgctggatgttttgatatcgccttctttaccgatccgttccatcaaagcagttacggtttgacttaatgcttctactgcactcttaacggtagaggtttcaccacctttaagaatggtattaatctcgaacatatgttgttcagattcatagaagtcattcatcgaactgtaaatcttaccaaatgcaacagttgactggcggttattagcaaagaactgagcgtcttctttaataagctggtcaatcgatttatcaatatcgataccgtattggaagtctcgacgttctgcacgatcttctggagtagtcagataatgaccaaaacgagatgtcgcgggtcgaataaccttctctactacttgcgccattacctgtgcacgcgataccagaccagcggtatatggaagcatttcgcctttaaagccagctggttgcggaacaatttctttctcaacttcgaaataatccagagtagccacaaagcctttcatggatagaggattaagaggtagaagcggatcatagttccacgtagtcagataacggaaaccgtctttaatatgaactcccatattggatactttacgggcaaaccaattagaaacattaccaatgaaaccagcttcagtggaaattgtacccagagcatcgaatagtttgtctgtaggagtttgatctacaggaagaacttctgtttcaggggtttgctctgctgcttgaggatcaccctcagtgaagaacttattctgagaactatcaaagataacgtcatcagtctggacgttttcattggagaccttctcagtgtatttattaagaacatttttaatcatggttgttttcctatggcacaagagttgcgaattctctaaacataaaattactctcaatatcaataaagtgattggctaatcactaaaaggtaatatcaatgttcgctaaacacttccaacgtccggccttccgcccggcggttaatatcggctgcctgatggatgtatccactggtaaatatgaacaaggtaaacacggcgagatgatctgtaacggtggtctcggtccgatgaccggtatcgcatctcgacctaacaactttaaaactgcactcgctgtgtatatgctagcgatggttcgtcgagctatgccgggttcccatggcatgatctatgataccgagggtaccttgaacccggttgcacgtttcagtagtcttgcagctcaattcagtgatctgcaaaagatcgattgggaacatgatgaacaattcatgttcactgacctttctcgatataccggcgatgagttctttaaactcttccgtacagcacttggtgagaaagagaaagcagaaaaagaatatcagcgcactactccgttccttgatgttgaaggtaacaacaagaaatgcatgtacccgacaactggcctgatcgatagtttctcgaagtttatcgttactgccgtatcggatatgtacgagaagaatgctatcggtgcatctggtaacaacaccgatgccatgactaatggtaaggctaagaaccagctgttcaaccaattgcctcaggtatgtgctaagaccggtacttatatcgtactgactgcgcacactggtgacatcatccaaatggagatgtacccgactgataaacgtaatctttcccacatgaagaaggatacggttcttaaaggcgttagttctggcttctattcgctgcctaacaacgtattctctatcgagtctaacaaacctcttgttaacaaagagaagatgcctctgtatccgatcgataactcgaccgcaatggaaggggataccgatcttaagattctggaggtaatgaaccttcgtggtaaaggtggtattactggccttcctttccatatcgtagtttctcagactgaaggtgtacttccttcactcactgagttccattactgcaaagaaaatggttggggtattggtggtaaccttctgaactactacattgaactttgcccagatatcaagcttagtcgtaccactgtacgtaagaagcttatggaaaacgaatcccttcgtcgggctgttgaaattcaatctgagatgcttcagttgatccagttccagcgttggacggctgaagatgtatgtgatccaaagacactgtacgaagatctgaaagcgatgggttatgattgggatatgatcctgaatacgactcgtggctattggatgtgtgaagaagacgaagctctcaccgataagaaattcctttcgacctacgatcttcttcgtatgcgtaccggtgactataaaccttactggatgactgatgatgaacgtgctaagattattccgttggatctggccaaagcgaaagctgcctaaagaaggagttgtgatcgttgaacctatccctgccgagcgcggggatttgggtaaatgcgaacagatctctttggcacgcgaagccgttgaaatgggcagtgaaaaatatagatccactttatctgacccagcaaaagaatggtacgagcgctatagagcaaacgaatcaaaacaggttcaacctttaaggatcccagaaggccgtggttacgcttctggtagaggagccgaggatatggacctgtccaacacaatcttcgctgtaggagctgctgtggccctttctagcgatactaccgatagtggttcaagtagcgatagcagttgttgtgattaatatcatagacgggagcattagctccctctatgtcaagtaggtattccaatgaacgtctatacttatcaaatcgctaaatggcgaaaggttagacagaaacatatctttcctttggatacaactataaaaagtggtgaggaattacttgcccctacctggaatatggtaatgggacataaagccggtgccattacagatgagcaatatgaggatgcgtatatggacatcctctctgaacgatacgctgcattcccagattacttcgaatggctgactgagttggacaaggttgcactaggatgttactgtccagctggtaagttttgccatcgacacattctcgttaaatttttaaaagaaataactgaggtaaactacctaggcgaaatagagtagttacccgatcaggaaacaaattatgtctaataccatcgattatcgcgctgttatttttcagcgtacccgtgctcttgatgtagaggttgctgaagatctgtatagacgcatgcccgaaatcaaggatcttgcaactcttaatcaattcttccatctgttgttggctcaatacaaaatcaacaccctggaattacgttgtaccctaaatgaagtgaatgattttgaagcatggtggcgtaacttcgctgctaatttcattccgctgttccgtaaaaagcggttacctccatgtacagacgctgctgcacagccaatgtatcactgcgagtctaaatcaatctgagtaatcgtatgctcatttgatttgtagaggtaactatgaaacccgatcgtaaagtccttgaaaaagaaattctatacttcatcgacatgttccgaccaggaagcgagaacgttaaaatctatcaagaactttttgaccgttattctgacgaagagttttttgaatggatggaacgtctagaggcaggtgaagtgctggctctctacgctcctaacttagaagaaccaactctaagtatcgctcagaattataaagtagctgatgctcttggttttgaactattccaacaccttatcttaactgatccgggcactggtcaagtttataagactcagaataaacacctagttggtatggttccgcttcgtcggcaggttcagatgctagctaagaaagcttctatcccaggttctaatactgttgttgacgagcgttctggacaggcaactggtgatagtaaaggtgcacgtctatctgcccctgagattcaggttaacgcctctaaaggtcttaacaacatggttctcgaactgattaagtttcgtggtggtgatgaaaaggcatataacgctatgaatcgatccatcattgaaacaggtgaagcttctctcgattccattatggccgagacgccttctcaagttaaatctaacaaaaccatgtccgtctatttgaaggccatgcatttacagaataacctagtggggtaatcatggctattaagaatgcggaagaaggtattagcgaagtattgcagaatgcattaggtgttgcaattagtgaattggtatctgttgatgatgatctcgttattgctcaaattctagagcatattaacgaacttagaaacaatatgatgatttctagttttaatgatagagttatcattaatcagatttggtcaggtatccgttctaagcaggatgtattgggtgctcttctgtctaccaccactacattcactttagaaattgaaaacattgatgtagcaattgagtatctcactagacgcttggttccattcacacctgattcagcaatggtcgatagggagttactgggtaaagcagctaatgtagatgaactctatggtacgctacagcaaaatcactggttgttcttccttgtatatgcatctacgcaacttcgccatgtaaataacattattgcacaggcgaaaatgaaatgatcaaacgtattctgatacctcttgatgtattacttgacacccgtcttggagtcatgtctacaattaacaaggaggcagcagaacggttggtttccactaaggaatattggcttcgtgaaaatgatgactggaccactctaacaggtggtcttgttacaacggagcaattcaaagaagcgtatgctaatagaggcggagataattccgctgatactatcaacgcttctatcctaacaggtatcagtccgttcttgatgcgaattctcgcggaagatcatgtaaacagaatggataacatgggtaatcctgaagacgagattggtcttacgatcaacatctggccttacacgttacctggtgaagttatcgatgatcttgaaaatatcatccaagaaatatacggcgaagaaatgcccgtggaagtagttagtcatccattagaagagctcacacctaaattcttggatgctctctatgcgatgtatatcacttacgatttccatgaatggatgcacactcattatcttgctttgtctaaagttcaaatgccatgcttcaattttattggacctaaactcttcgaacgtgacgttagtaaactcactatcgaggagaagaagtttgaactatttaagttcagggtcgagcggctgattcacatggactttgaatttatagatgctaaatatttctccatgattcgtcctggagataacggtatcgaagttgataaagacgacataaaagcccagggttaaccctgggctttatgccgctattattagtagccagcacctttagcgccgagccattcactaccatcccacagaagggtgatgacagtcttggttgcagcagcttcaggagccgtgttatcattccatttgaagttaccgctgaaggtcggaatgaccgtaccagttagaaccagtacagctgtaatcattcggccagacggaccatcacctagagtgatagtacgagcagcagtagatggaacagtatagcactgttggttagccggagtgatggtgaagttgccagcaggagcagcaccagatagcagggagtaggtatcaaattctttcttgatctctacccacgccgatgtaccagcagcagttgtctgacgaccccaaactttagtagcatcgatacctggttccggaatggttaccagttctttccactcaccgttagaacgagtgtagttcttggcatccggagcatccgatgcgataattgcagccggtacctctacccagctggacacgccagcaacagtagttttacgagcgtacagtttatcatcattggtagtttcaggtactaccgcagcccaagcaccatccttacgagcgtaagacttaccatcgctagccgcgtctttaaagacatcggtttcgacccagctagccttacccttcagaacgtaatgcttatcaacatcgttggcaatgacaataggtgcaccttgtttccactcaccgtccttacgaaccattgcaagagcaatgttgggagtaggaacgtctggtacagcatctacttcaagcggagcccattcggtggtgccatcagctttacccttacggatatactgttcaccttcttcaggggtttccacttcatcgaccagtagaggtgcccagccaagttgatagcgaaccatcttcttgttctgatcggcagtttctacttcggctacaggaacatccagaagttggatgaattctttccagccagttgcgtcacgataccaaactttaccagacttatcaaggcaccagtcatcttgagtaccaatagtgttattcgggatatcgacaccgttcggtagaattacccaacgagaacctttatcaccttttgcaccttgaataccgcgaggaccaacaataccttggtcacccttatcacctttttcgcctttggcgccaacggtgaagctacccaggttcagatacttctcagtatcatcagcaccatcgacagcccaaacaaacagttctttactgttttcaggaccaaccgaatatgcatcaccaatagcactagtcggatgagcagctgtaagagcagcttcagacggatagtcgccaacaattttgataccttggccgatttcaccgcgaggacctacttcaccctgcggaccatcgttaccttgcggaccctggatattgaacggaccatcgtaggtattcgtagagcggttagctacgtagattaccttaatggtgtcatcaccctggataacggtaacaatgtacgcctcgccatcagcgggatcagtttcaccggctatcagttcaggtagagcttcaacagaacctacttcaccaacgatgcgcatcgaggcgccacgatcaccctgttcacctttctggccaatgggaccaacagatacgaactgagtaccactaatgtttacataaacatcgccgcctttaacaacaacggctttacctttgttgtcggcagtggccggaggaacttcacctacagtgtcaacaacagcgatgatttcaaagttttcaccctgatcacctttgtcgcctttatcaccagtgtcacccttggcgccagtatcacccttatcgcctttgtcccctttatcgcctttggcgccagtatgagtaccaaggtcaacccatgttccatcaatgaacatgtagaggtggcggttatcggcagctacccaagcttcctgttcttgcggatcaggtacggcttgaatggcagcaaggtcaggaagaacaccggagacaaccaggttcttaccaccgtcaccggtgtcacccttatcgccttttgcaccggtatcccctttgtcacctttatctcctttgtcgcccttctcacctttgaattgacctaggttaatcaggtcgccttcagaggtaacaggagtagtagctacgtagaagagggtgttaacatcgcgaacagcgtaagctttcttgatgacaagagtagcacctgcggccagaagatctgccatggtcggatacgtaccgaggatttccaggttttcaccaggagcaccgtcttgaccatcgataccatcttgaccaggatcgcctttatcacccttatcgcccttgtcccctttcgggccgtcgccaccgatgataccgtcttgaccaggttcacctttcgggccctgccaagtaccgagatccatccagcggttttcatcgacggagaagacgaatagatggcgtacatcgtcaaccataaccgaatatgcttcttcaggcttggcatcgccagccagaggcagatcatcttcggaagctaagtcagctttaatagtgaacggagtagcgtccttaccaggtgcaccagtgtcacctttcagaccatggtcgcctttatcacctttggcaccagtatcacctttaggaccctcaggacccatcggcacgatctggatgtatgcatagttgtcagggaagatatcttcttcaccagctacaagcatgaaagtgtaaagagcatttttccaaccgtaggtatcgcctttggcagccaagggcggaagttcttggttatcaggccattgaccacgaataacaagaccagtaccttccggaccacgcatgtcaccggagtcgatccactggccagcatccggcgaaccggtttctggggcagaccatactttcagtacagtagcagtggaagaacgaacgaaccaagcatcaccaaattcccaactatcgatgggagcaatgttggtttcgaaatcgtcaagagttacggtacctttgatattggtaacgggacccggttcaccaggattaccttgcagaccagtatcacctttagcgccgtcttcgcctttcagcgattcgagccactcggcttcagtaccaataaagccagcatcgagtgccagctgataagcggatttaccatccgcgccatcctcacctttcattccctcgatttcggtcgggtctttgaaagttgtagccaggccagccccggtcgaaaccgggatcttgcctgcaactacctcaagaggattgtcttcggtggagatacgttttggtaactcaccgttaacgaaaacttcaaatgcggattcaccagccattatacaacttcctcaagttcgacgcgcatcagaccggatgtgttagatacagcgttagctgcgtcgcagttataccaactattgctattcttgatggtgtaagtatttacagcatcagcatcgtcagctttataggtgaagttaagagaaccgctagcacccttagacaggttagtgcagcgaagtttaccagtcataactacatctgtaccaatagcaccttcacgattcgggaaagcagcgatagacatggtacgaagaacgaagccaccaagggtatactcgccaccagctttaagggtattgactgtaacgccagccagacctttggctacaacatcggtaaagttgaagatacctttagcatcatcatcatgaacgagcagtgtgcgtgtccatactttcttagctgcatcacccacccaaccagcagaatcccagttaccgccaggagcagtcatcacaggggcttcagccagcgattgagtcgaagtgatagtgatggtgtgacgctgtacaacagtacctgcattaccaccagagcgcagacgagtggcaggagtggtaacagtcagttcaggggcaccgttagcaatcttaacgattgtcgatgcagtagacgaactaccgttagcagcacgttgtgcagtgattgtcaggttattagtcaggtcgttgtaattaccagtcaggtaagaaacagttttgtttgcttcaatctgagtcgggttagttacagtcagctgaccattagccgaggtgtaagtagcgctagtagcgttagttacagtgttagcaacggttgcatcttcaccagctttaatggcagtttgaccagccggataagttacagcaccgaatgtaatcgtcggtttcaggttgttcagcttgacaacgttgactttctcagtagtaccagctacgtcggacttataccacgcggagaaactaccggaggctttcttaacgcggatactgaacggttggttagtagcagtgttaccacggtcagcaataaccagaccagtcagactgtgagtcttaccagcagtcagtgtaccattgcgtgctacgaatgcaccttcatcacgaatctcataacctaccacatcttggtcagtggtgaaagtgatcgacattgtgtcgcctgctttcagctcggtttgagaaccaggatattcacctgtaaatgtagccgcagttacaaccggcgcggtatccatgattacatcagtagatgccttagcaccatcttcgtgaacagcttcgaccttaatgggatcactaccaaccggctcaggcagattaatagttacttcaccggtccacatcggggcatttgcaccagcgacgagagatacatctacgccgttaactttaacgacaggacgatagttagtatgaccggtaatagcagccactttaactttaacgtcacgagtagacgaagaacattgcaccagagagaaactatccgcggacttaaccttctcaccgacgttatcagcggcattaaccggagtgatatcagtgatgaatacgccaccatttacacctttcggttcggcaagcgacaggttaaattcttcttcagtaccaacgtatccaccatcaacagcggattcgtatgcggacttaccattagcgccttctaggctttccagccattgttcttcagtaccgacgaatccattatcacgagcgatctgataagcagacttaccatcagcaccgtgtaggctttcgagatattcttcttcagtaccaacgaaaccggctgctacggctagctcgtaagcagatttgccgtcagcgccatcgataccgtcatcacctttagtaccgtcgataccgtggagagattccaggtactcagcttcggttccagtgaaaccagcttcgacagctagatcgtaagcggacttaccttgatcaccctggtcgcctttgtcacccttatcacctttctcgccggcatcgcctttgtcaccttttagggactggatgaactcggcctcggtaccggtaaaaccagtatcaagagcggattgataggcagacttaccgacgagagttgcaaggaattcttgttcagtgccagtgaagccgttatctacggcaacttcatagatggatttacctacagcgccatctgcgccgtcttcacctttaagagaggcgaggaattcgtcttcagtacctacgaagccctgttgaagagccagctgataaataccttgaccttttagactttcgagccactcagtttcagtgcctacgaaaccattctttaccgcaacttcataagccgataggccttcattgttacggattttagaaaccatgagacggaagttcttataagaaccatctgcctcaagacggataacttctacaaactcttcacctgtgatggtgttaagaggctgcattccggagatcatacccggactggatttaatggccattacgtattcctttgttggagagagtcttcgcaactactcgtgcacgtcttaaaaggaaaataagactcatagagtagtgtattattttagcaacatataggagtcccaaaggggactccagtatgccttttcaggagagcatctatctggagttgcgactattttatttacgccacaacggctggatcgagtttccaagaaccattttcgtctttggtaaaaccaatggcgtccagaagtgcatgaatacctttagcagtagcaaagcctgtatcatcctcaccagcaatgacagcagcttcatcaaccttagtcggaatatccagttcaggaagctgttctattttcagtttaccgtcctcatcgagatctgctttcttagcaagagcatcaaccagtccagtaactttatcgatagcaatacctgcatcgatgatgacttgtacttcagcggcagttagaccaccgatctgagcaccaccgacagtaacgccatcgtgaacataaagcttcttattctcaagatctacaaagaacgttccttctttgcctgtccaagctgccgcttctagagcagagccgcgacgatgttgtagaagcagttcactgacttctgtggcacgcccttcatcgaacgatacttctttaccatcttcagaaacaactacaccgatttgttgtagagtggacataaccgcactcggtgcatctttgatgtaaagctttcgatcaagttctttcttctgctgacgagaaataggtttatcagcatctgctgtattatcgaccttatctaagtttgcaaacgaaaggtcaattactttccactctggaagacctagttcatttacagtgagtaccataccagcgttttctggaaggatctcaaatagaggattggttgcagaaacccattgttcttcagtgccttcataaccctgatcaactgcgatttgatacgcagattttccaacgagtgtttctaaccattcttcttcagtaccgacaaaaccagctttgacagcgccatcaaaagcagaagcgcctacacgtaatttatctgcgagtacacgatagttcttataagaaccttctgtatcgcgagcaacaacctctacgaattcctgtccggttagaccagacagaaaatcgagttcagaaacctttttcttttcttcagccatcatagatgtccttcaggattggctgcgttgcacatattcttttaacctgataataccaccttcaaacctggggaagtatcaggttaacaaaatccttttctaagtgttaccaccgttaaaagaacaggtggacgctatgcccgatgtttcgaaactttatcttcgaacagcttgtagatctctgcaagggtacgtggtacacctttattgctaaagatcgacgggtttgctttagcaggtttcgggaatagaacttcaccgagagttttctgatctgcggataggaatttcttagcgccgccagcaccaaggaaatgtgccaaatacaagtctgtatcactcggttcgcgattgattactggacgtaatacagctgcatttcctttaaggaattctgcacccattaatgcatttgcacgtgggtctttacggagtgccctagtgggatctttaggtagtccgtatttggaaccatgtgctttgatcatgtcatcccatgtagcatcaaggaactggaaccaaccagtagccgaagatgtagatgctttgacagtgtaatcaaaagcagactcaatggaagcgaatgtagcgagtaaccgaggatcggtaccagtcattgctccaaccgcattcagagtgggcattgcagccgaccgagatttattggctgttgggaaagggatagcttcccatttagcaggaacagtagcggatttggctagttcagctagagtagcaggtccaacttttccgtcaaccaccaaagctttagaagcttggaaatcacgaacagctttctctgtatctccaccgaagattccgtcagcgctaactgcgtatcctgcgactcgaagtttcatttgtagatcttccacagcagagccgcggtcgccacgtttgagtacagtacccatttgtctgtctccagtaattaatgttccagctcacgaatcaagccgtcttccattagacgataaccaccatcctcaagtagacgtgcatattggttaccttcaaccatttcgatcgtaacgatagtcgaaccgaagtaggcgtaactaccagtcattgcaacgagttcatattcgaatacgtcgtctttggtattaatgacagtggtagagaaggatagatcgtccggaccgaatgtcatcttacgggaacggttgatctcttctgcgatggccgcaggtgtagctacaccagatagtttaatagacggattaggtccaagacaatcagggtgagacaattccagacgacgataaacgaaccagtcttttagactagctttgttatcgatcatctcgatataagtacgccccggaacaccagaagtaggactgaagaacatatcttcgaagtttacaaactcgtcctgaatattcttgtgtttagacgtttcccgaatcaaacggcaaagtgccgcacgagacgggaggttataaggaaaacgatcgctcattgttaaaccctcaattgtggtttacaaaatttacttaacccacatagcattataaaagcccctccacttaaggaggggctaatattattgttactgagtagaaattaccatcttaatgatttcaataagacccatacctaaagttttaaagatatcggctacttctgaagtcattggaccatcagtgttaataacactcatcaccacaccagtggatagtatagctaacaaggcacttgcagttaaaatagaactgcggtaagtatcactagctctaacaccagtgtattctttttcgagaagcttcgactgcttttcaagatcagaaagagaatagatctcagttaatacttcatcggcagttgtattcccattaacacgtgcactaccatctgcatgtaacataccgttcaagtatgctacgatttgacgatagttaggagctttcgacaaaggcttatcgccaaggtcacttaatattttttccagagtcatagcttctctccatctctgactgttttttatcccagtcacggagcttctcgatttgcaaattacacgaaccgagatagtcagtctgtaataaccagtgatctgtcatcaataggaaacgagcttcccatggatcagtgatcccagctactttataccgactaggtgcattgatgagatcgtcagctgacggtggaggagctacatagcaaagttgagtaaagctacttggtaccgcactgcgggtccagccgcttggctttgcagtagtgctcgtacatcctattagcaagggtgataagagcaacatcgtcagtaacactaccattatctttaatggcggtggtgggatttttccgaataggttcatccctagttttttccacagggacattttctgtagtaggccaactgaccccagattgtccggataagttaatgtactcatcaatcactcctgctcgtgattgttccagctctctcagctcatcgactttttgagtggtatactgagtaacggtttcatcagtgatggcagctgacttaccctgcatttcgactttgacttctagttgaccatttttctcaactaaactgccattgtgtacaagctgatcagtatactggttatagaagaacaacagtccaagcccaccggtaataactataccgataaacacccaattaaaccacttgatgttttttaaccagttgaacatactacctcacatctagaacaactgtgtaaggaaatagtaaccgattgctacagcatcgatggagtgttcatctagttgattatggtcaacatcaccccaaacaacatcgggtctacttaccaatgcacgtcgcacatcttctttgtctgtacccttaattttcttcatacccacgttggttttaactgttgtagggtcaaccatgtaaagcggtataaaagggtcatactcaaaaagagcacttcgtataacggcaacacattcaaccaatgcggcaaagcttgtggcaaatctacctagatagttagattcaacaataacagcatgtggtctatgtgtccttaagaagtctagtatcaaatcacgcatgatcattaatcggactacccgactaccatgcaattccccgaacattgaatagtccggatgagtatctctaagaacagaggtataggcggttttcaccaccacaccttcattcttaaagccatgttccaacaacgcttgacccaagttagacgaacctgggtcgaacgaagcaacacggaatggttcatcactttcaggcatctgcaacataactaagtccttatacgaacttagctacgtttacagccttgtcgccaagagtaggttctacaccaccaatatcgaaggttaggttaagaccattcgagttataaccaattggatggttagtggcaatatgtacgttaacttgacaagcgattacttcgagatattggaacgaaccacccgtaccggcgggtgcatcgaccttacggtcaacaccagaacacaagccgatctcagagataatcggagaacgagtcgatgcagtacgaattcgatgcgcgttggtaatctcgatgatatcttcagcagacaggctaaccttaacgatagcactggccgagatattaacgttagaaccgataactgtaccgttgttcgaaatagctggcggtactgggttaagatcatcaacagtgggtgtgtacggcttcggtgttggaataccattaattacttcgatttccagaagctgtggttgtacacctgtaacgttaatgcgcattccataataggcaacgtagtttttaccattatgtttttccggaacacgtaagcagaaccgatcccgttgtgcagctggaagatcatcagttacttcacgcagtgcaaacggaatatggttataaagtgcagcatggttagaacggtgaatacggttttctacttcatcggagccatcagcggctttgattgtgtagtgacccatgttaccaattaccatataacgcacgttcggaatttcacccgctgctggagttacgccattttgtacaccgaacttctcattcagagttgtatgtgcaatcacacggaacggagatagaccgagatattttgtagtttgcagataagatgcatagcacgtacgtactacgttgataatctgctgatcgatagggttactagccattcttttaatccttgacttagaaagttcattgtaccattgtgtaagaatttttggcttgcctcccgttagggaggtttatgccgttaggtgtactgttggaagtcaccacgtatcattacacatgcccacaactgaccatggtcggatttaggaatcgcgtgaactgtactaaggttaaaggcgatctgctcacctttacgaagttcgatcaaacgtccattaagttgaatggcttgtctatcttttaatgcagttgcgacgatggtacctgcaccagttttattgacccacgttgtcatctgatcgaggaaaccacgaccagctggaatatctaggaaccaaccttgaacagctttattttggatatcttcactaaaaccaaccttaaagatatcacgttgtttagatgtccaatcaaaccacttagaatagttgtaaatactcagtgctttggttttgttcttaccgatacggcaacgagagccatacgagtctttgtatttaaccttacgagagaggtctactaaagtagttacttcctcttcggtaagggggtcgtaatgtttatacatatctgtcctactcgtagagatagatgagaacgaagcgtaggtgttttacgggtggtacagaatgcggtggtgttttagctggaaagattactgctcttccaggaacatctgggatgaactcaccatttaggtcgagtccatctccattatcacacaatgcaatcaccatattaaatcgatacattgcaatgtcgatatgctccggcataccaaaaccaacctcgtacatattgacacatgcttctttgggttttatcccattgatagttggtgcaatttcaaacagataatcgctaagttcttttggcatctgaccattaccaaggaaccagtagtttgcttccactgtacccttggtagggatactatttatcttcttgcgattgtaccatcttgcacgaggtagcgcttttaagtactccaccagtctttcactaactggttgcgaaaacacgaccgccttcgatgtttcttgggccaatgagttcatggagaccgccttcgaaggtagcagctcgatcttcggcttcttgctcattggtaatgtattcgtagttgggatcattctgatagaactctttgtgatttcgactagtatctttacagagtttgatatagtctagcatctcactaagttcagtaagttcaagaccggtcttctctgcaagagccacgattgcacgcccaagcacgtttacttgttctacgacaggataacgttgagtgatcttgtaagccatctggttgtccagctgtgcttcatagatcagacgaggaccttcgttctctccaagaatagagtagttcttttcccaggttccatcgtcattgatggtgaggtcaccgacaactcggtcaccattaaacagatccatgttgtcttcaacatagatcacgtttgggttatctggatcgcattgatcgatagtcatcgaagtagcaacgatgaacttaccattcagacggttaaaacaaaggacaacaggtttacgacccttttcaggttctggtacattatgaaaatcgaacatgtgtaatttcctttagacgattcgagtgagactactaccgttacggcgcattacaaccattgttggcattttgcgaccattgttgaagtccagcaagtattgagcaaatccataaccaccatcagcaatctgcgagatatttgcctggagagcactgatagcagcttgagcgctagcataacgtccaccagcataatagtgcccacgtgcattggcattataagtcgcaaatagatcacggaagtgaacgatttgtccattacccataatgcagtagtcagacgggatatttggacgaccttgaggatcagttccagtaggaggccatggagttgggaaagtcgtaacgaattgctttaattcaaagcgagtgatattccaaacgttactagcatctaggtcaactcgtgcagggaaatacaattgttcccaaccaaccccagccaaccgtttagatgtaaatgcgcgttgtgtacggtgaagccgttgtgcataaatagcatcgatttcagctttactgtacaagttcatgatcgccagtgttaacccatgagggttattttgattacgaatgtgatctgtaatctttggaatcaaaatggattggatcagattgaaaataccaccaatcggcatatacacattggttaggctagtatctgttgtctgagcttttgtagccattggccagttgttaatttgcccaagcttaatctttaccttatccgaagagtgcggattattttcatcggttatgtgagcgttcacacggttgatataattctgcacatcgtctttcgcaagctgaacgtaatatttgtaataatccgtaccagccgctagaattgcagttcgacccactgcccatgcatcacctaaacggttaatattgacaaccgtggattcaagaccatacaactgccaatatttgtgcatgtgttctgatggagtatatgcagttggtttaccgatgatttcttcccaagtaaacttaagattagtctcatctatcttctccattagtgctttaagttcttttacagaaacactaaagaatccacccactgcatgatattccgcacgaacgactggtgtgacggaggcgttgatgataacaacgagacccatcacattttgaccagtcatttcagaaagcttttcgtagtgatacgttagaacatagtctttaccacgcacaagagctttaccagtagagtccctcagtacaaagccattcgtatagaaaccgccatgggtacaaacgaatacgcgatgcttcttaccaggaacttgaattagagtgtgttcctcacctttaatccagttatctggatcttcaccggtaaggtcaagctcaagaaaagtaatatcgttcatttataccttccaggaatttaacgatgtattaaatacagcgaaaccaacggagttaatatacgttgtgattgcaccgttaccagtaccgataccccagccaccaagataacggaagatggccgttgtaccagcagggtggttcctacctagcacgttgttcaactgagcttcagcgtttgcaccgttaggatcaaatgaccctgccgcataaataacgctctttggtttatcgatccatgctgtttggatatcgatccaatgaagccagcttgctgcatcagcagaagcaggaacaaggaacgcgtagttgttagcaggtggaatagccccacttgcaaaagtttgcggtggcagcaaaccagtcttcagctgtccaaggatttcatcctgacgagtgaactcgtaaagctcttggaaagtcatgtcattgctagtcgtattgttgttggcatctttaacgccaccaatacgttcggtactgttaacggtttcaccacggttgtaatagttcccagcaacttgctgatgttcttgaacggtatacgtaccaagtttagcagctgtctctttgtgtgggttattacggtcatcaacgtgcgcctgtagaatcggtaagaagttcttgtcgatactttgcttagctcgtaatggcgtagcgtaacgatccagaatatccccgttagctgcttcagcttgatctttcgtagcaatagcagcattcttcactttatccagctgaactttagcggcagtgagtttgtgcgggttattacgatcgttcatgtgggtagtaagacgttgctcaatggaagtaagttcatctccaactaaagcaagctcggctttatattggtcaaacaaagcatccatgtctttctttacgaacttttcaccggcggcagtaattcgcttaagtagtaatacttgaggcgtaaacccgtaaagttcccacaacgcatgtaggtgaccgttgggtttgtaatcatccggtttaccagtaatattgttccaatgaatcttccgagtattgttgatcaacccgagtgcttggttagcgattgctttaccaagattacagtaaacaccaccgaccatctgggcatcaaccctgatctcatggtgaacccgtgggttcttaatgacaataactgcaaaagctggaatgccagtcttcttagtaatctctggatgcatctgagtgcattggaaatcgtccttctcttttaacacataaccacgaccatcgatcatgtgcaaattgttattgtagaagtaacctttatccagaacaatcacccgatatggcagaccagcttgatctgccaagttgtggtattctccacgcgtgcggttattgaaacaagtgcccgtcccatcgtagggaagagcgtgaagtaatgggttcatgttgattcctttagattggtacccaaccttgacctgggatattcatagaagcgtaaagaatgtcatatataccgttccatgcaccgttaccagaaccccatgccttagtctcgcgaatgtaatagaaaacaatactattcaaacgcatgttagagaacggcggtgttgtagcaaccattgcgttggcttgcgcctgagtgatattgacactgaaagatgcgaatgcaacatctccactgccaccttgaggaagaagagatagcagggcatcaatgttagtccagttccgattgttatcgagaacagcacggttattcagaataccacgaccgagtcgaccaagaggaagtttaccttggtcgtagttagtgaaagcatttgccgggatatctttacgatacaactgtagaatctggttgtatgtcatatcctgatttaaccagaatccaaggttagagttttcaacaacttcattccgtagatatttggtattagctagagcattcacttcttgcttgctgttggtattcaattgcgcattggtaacaccatgcacattacctcgggcatcaatgtgcgcttgtaacggatcaccaccaagtttatttacttcagcagctgaaagctgtggggtaagataaagctcgttagatacaccggcgatagcctcagcaagacttgccacgcggtagttttctacaagtcctaaacctacatgttcttttgtatcaacgtgcgggttcgctttatcttggatgtgtaaatcgagtcgattattaaagcgttgtaagaaacgatcatattccgcttttacatctacacgaaactcagcttctgtgttaccaagctgaccagtaatagcgcgagagatattctcaatctcgttgttaaatggctggtaagtatcaaggcgccaacgtaatgcggctaattcaccaggaccataaatcggttcagtaccgttatagtcaagccatttaggaatatagtcagaaggcttggtcttccagaagtttacataatcttcgataaccgtgaaactaaacgctacatctccaccgaccatctgggcggacatgtaaactttaccagtgcgagtacgatctaagaaaacaataccgctagcaatatcaagtccatagaactcactggcttgtttatggtaatacgtgacaatgtaatctttatcacgaaccaaaggaatgtaacgagagtcatatacacgaaggctattaacatagaagccgccgtgatacatggttaccattttaaacgggaaccccgagataggggtaagagttgcttcttcgctacctaccaggttattcggatcacgtccggtcttatctaacggtagttgtacgattacatcggacatttaaattctccaaattgaacaaaagacggaaccaccgtgcttttacacacagtgattccatccgttgccagggtaggttacaaacgatcgtaagcgtcgttaaacactttctctatcgctttgaagatattctcctcagcgtagttgtctacccgtttaggtgtcatgaacgaagagttgttcgtgccacccttagcttgtgattgctgtgccggtagccagtcggggacattacccaaaccgatatccataggctcaagtccatgaacgttacctttttcaaggatgtgtgcgttcatacggtcccgagcactacggagcaggttgagaatgatgttgttaaactgaccgatattgcctttcagcttatcgagttcgacacgaaatactgtcatagccatcttaaatctccttagggtgcgacaatagtcgtcccatcattccagatgagagcattggtcggagagtcaccccagaattcagtgtaaccaagattattgacagtaacagtgaaacctttaccagcagccgcactatagaaaggtgctgacccgtaaggaatttctaactgtccattctcattggaaccgaacatagcgatatcagtatccatattctcaaggctggacggatcacgtctaatttgaacagcatggtgtccgtagttaccagagatagaacttacatcggttagggtatttgctttgactagacggttatctttagccgaccagacatcgagagtagaagtgacttcagtcaacttgaacgtaggtgtatatgtaatctcatacacacggattcgactagcattcccgctggtggtattaccaccttggaacacgagatacttagaaccaatccggatatcagagatttcccacccaccggtcaattgtgctgcgataactggagtagcagccgaaacccagtcactggcacctattgctgtataagtcggatcaccagaaggcggagacttttcaacaattgccatttgacgagaatcttcatcctcagtcgcaacccacatctcagtaacgttatcagattcagcgtacagttgagttacagtgccgccggcgatcttcatgatcttaccttcgtctgcaccatcactgggcttcagttgaacatatagagctgtcttagaaccccacatagcaaccattgcattcgcctgattgaaaccagcgcctgccgcccaacctgccgggatagccagcttagcagaacccgctgcacggataccatcaccttgagaccaagtaccggactggaagtcacgtaccgctgggactaggtgataatctgcatcttgtagacttagccacgaccaagctgctccatgaattggagtttttggataagcatctgctccacctggctcggaacgataaactgtatcacccgatccattgaacaatgcatacgcagcagcaccggcttgtacgccttgaatcttactcagtcgctgtttatcttgttcgtctggaggagtcggatcattaaagctgatgtcagctgaagatgcaataccttcagcgatcttctcagtcacttccgacatgatcccattgatatcgctattagctgggaatttagcttcccattcctcaggtgtttcaccaccaaaggtagtagcatcaccaccacttccaccagccgaaatcttctgatcaatttcttgcttggtataagtaccaattagaccaggagtgatattgtgcgggttagtatcggtaaggtgtttattgaagtcaatgattaattgatcaagacgaggatcaccttgaacggcttgaataagcagagacaccgtatacggagtcatcaaggtactattgttagtcggatcaacagcctgttgtggtgttgcagcaggatagttaggaacgttacccagaccaatgtcacgcgggaccattccatgaacgttaccggtcgcagtaatgtgagcattaagaggcttaagggcattctcttgaatagaaagcagcacaccacgagggttcgtaaacagatcgttacgattaccgtctttatgttgctggtcagtcgccatagagaagttaggcacgttaccaagctgaacctgtaccttattaacacggtgcgggttatcgaaatctcttaagtgcgactcggttgtaccggaagcagttgcttccatgatatcgccaagacgttgaagagaagcattaatctcttctgaacccactagactatcgatcggttgatcgtgatcgagaggtgggaacgaggcagggagtacatcaatattaccccatgcacgaatcagcgggttatactgtcgacgagacagttccgccagaatagcttggtcgctaaagccccactgcccaccgatggtccgatagtcaagacgtgcttgaccggcgatagagcgtttcatgaagcggatagaaccagcgatcggtcgaccaatagaatccattgcttcgatgaaacggtgaccgatcatgtaatcgacaccctctacaaacagagcaccggtctggttgttccgtactttaagagagtcgacaaagaaaggtgccgctttcggaataatgaaatagtaatcggtagggccgggtacttgcagggtttggatttcccctgtgataaggttagctgggttagtcccatgcaaatcctcgtcatatagaccggttgtactaacggtggacatcgcgccctcctttaaagcgctagcgcgcggttgttagcgtaatgatgtgaaattcacataagattgtccgatcttttctaacggagacatgacaatgtacgtgcttgtacgttctaggtatcgccctagtcgccgaggtggtcggtggcaggaagcggactttacaaatgagctagtaactacactagctgcgaagtatggggatatttatctctacatccaatatcctggccaaggtgagcctgtaacaagagcactgcactgggttaatgttactaactggctaaacgatgttgaaccaactgttactgttcaagagtggttaacctctttaggtaataaagctctcccctttgatgcagaactaccaaatgaaaaaatccgtttggtaaaatatgctcaggcatggcactgtggttataactttacccctgttgctcgcggtggccacccacttgatcaaggaagcgacttccataaagaagaccttcttatggttcacccaaaacaccaacctgcaaagatcagagattattcaatgatctcggttaacggttatttccatctatgtgattataccagtgctggtgtaaggattatcgatgggaacacgacgttacgtaaatgtaacgataaccaaattggtgtctacagttttgaaactattggtaagcttacctttgttcctattgtcgatagcatgattagtggacttaatcccactgctcctctttgggatggtgcttatctaacaatgcctgaaaacgtagatatcgataacaaaacagtattgcttgttaccggcggttatcttaatgttctatctagtgtttataatcgcgtaggtgaaaggacatggagagtacagtttggtaacatgatgttcttggatcgttatcttgaatcgtaccacgcaatggatctctcttccctaggattaacattcgataaagagaacccgactctattcaatgtagatgaactcaaaaacaatgatgttatccgaaagtatttaactcttagtcagagtttctttgtaatcgttgattcccaatcattcttccaggaatacgaagctgtagaatatctcaatctacctggacgttacttcgataacaaatacgatagatcgcctctcgttggtgcgtatggtaggatgctagattatcacacaatcaaagaacctcaccatgaaggtataatccctcaacatgaaaatatgtatgtctactgcgctgtattaaaccgtaggaattcctatgatgctaatacgcgagcatggcctgagcaagagatcgttgatggtggacgttatccagctcatccgtttagagacgagacagcatattatcgaattttaggggttgaaggttaaggcaacatattgcccggccttgagccgggctttatgtcgttaacggaagtcagatgtatcttcttcgtcttccagttcatcctgttcagcggccgatattggatcttcaagaccctcaacttgcggctcatcttcgggattagtttcatcggtattttcactggacgattcatccatgtcagtgatatcactatcaccagctggagtatcacctgtaccaccatcaacaccaaggtcagtataagaaccatctaaatcagagaaggagtcatctccagactcgtcattattgtcattgttccaactgtcaccaccacctacatcatcagctccatcgatagtagatttatacttagcctcaagacgcttcttagcttcttgttgatgcttagcatagctaaggatagcagagccaacagtttcctgttgtacgttcagccaatccagcaagctgaatgcaggtttatcaccatccatttctgtaagaacattaagttctggaaggatgttgtgtgttgccataaactgacgtttaaatacagctttcaactgaaccattatctggtcagacagaccaggtatggaagtaaactcatcagggaagagttcgctggtgatgtagttttccaagcccatagtcagaagtcgatcataggcatccatcgattctgcttgacgttcatgttgagtattatcgggtgccggtagagaaacctcaatggcagtgataaactcatcaactacttcttcaactgtcaactgtttaagttcaggcgatgtcaacatgtcaacgttgtcttgaataattttgtacatttgattacgcaggatagaactgtgcgttacaaatacacgaatgaatttagacaagtgttgacagaacgctttctgtttctctttaacacgtcgagacattacaaggtcattctgtaccacagaagtagcgaagtctggagaagacatcgggtctactttctcaggtggtacacccatacccgagatgtgcatacggcgaaggcgatcttgtagatcaggattcccagcattaacgttggtattgtaatcgtcgtattgcacctttgtctctgcgtagtcagcaccattggtgttgatttcaaagtcaaagccagaacgaatcagatggtccatcgcttgcgtagggtcaggagcagccagagggaaactacggtgcgccgattccatgatattcgattggatattactgattgtttgttccggatctgtatcgtcgggatcaagagtaatacttacacgcttacgaccaacagcattacgcatacccccaatagcttctgccataagaagagtagaacgcatggttgcgataatcttcgagcgagacagaagagtttcaccaatgccattttcgttatagtcgaatgcaatataaactaaaagctctgccgggatgaataccagttgagtatgtttagctttccaagaacgatacaacatgatcctctgaatttcttcagttagaccgatctcaatttcttgatcatacatgccgttacgaagacggttgttaagatcattcacaataatcgcgttgtatgtttgctggatttcatccacttcgaaatcttgtttagaagtattagcacccatcgcttcccgagtaaggcgtagaacttcagaactgttgtcgttattcttaccacctttccaacctgattgaagctcaccataaaaatctcgggttgagtctttggagagcgggtaaccatgttggtcgaccaacaagaaatagccgatgtgttcatgtgggcgcccctgtacgaatacgggtacaatggattccattggaagagggagagtcaatggatgtccaaccgaaggccgattcatgtacttaggagctgtgattacctgagtatgttcagtgccgcctagtctattctgataaagctgttcgatttcagcgttaccgaatttatgaacagcgttttccatcgagatctgattaccgcgaagcttacgcgcaatattcatttcgcgtacacgttgtgacatcgatggaactttgagaatgttaaagttatccgttacagtgaggagcttatctccacgaatacggttagctgtagcattatcatgatatccctcaagagagatattgttcttatctgggtgaccaaggaaacccaagttttcattagttgtattctggacacgatctctaatagaggagaaagtttccatagatacctggcgacgcccattaataaggttatctagaacgttttcagggagaacagctaagatggaagcacccttacggaacaagcaatcccgaaggatcaggtccagacgctcgtcaatcttatagtctcgtttaaagtacgtttcaactggctcaagcaaaagctttgcaatctcgctatcaaagatagctggatcaatagcgaatgtgaggtccgtatccgaaagtgctttaggatcgatgatactaccgacgtatactgtttctaccaactctaggtctggtagcaactgcataatagagtcggagtcaacgatctcttgcgaagtatcacgcgaaaccttatctaatgtgaaacggtttacgttcacacgaggctttgctgcttcgctgccaattgcgttcgggtccttacgcaacaggttgaggagggcgttagtcggagttgctttcgatcctaaacggagcgtctgcaactttgggtacgctacctcattcgtttgtcgagccatttgaagctcctcgtttaacaagtgagtaaattaccatgagtagcatgtattttggagtttaccgtgacgatgtcatgagacttgcaagatctgtagtaatcaagttttctgaaatagctaatcagattaatgaacgcctaaaagaggtcggacatgaagctgatccagcaagaccggagacttggaaatattatcagaaccttgctggtgagtatcatgaaacagatgtcatgatgacagttcgttccgcggatactcttgaaatcatcgatttcacaaaagaaaatctggcgcttcaccgcgctactgcgcgagagtatattccgggtagcgttttatacaatagccttgtaagacagttcccagaacaagcaggtttgattactggaatcttatatccaattgacatccaaacggcaatagattcaaatgatggggatattttgtactttgatccgaagtatgtagaagataatgaatactctttcttccatcaacttcagtcgtgggttaatgtatttattactcgctggtataacccgcagtttaatttaactgacgatctataccttgcaaacttccttggtcatttatatacccgtttacctattgctattatgcttattcgtctgcggaatgcaaagactaacgaagcgcatagttatcacgttacggaatacctcgcatctcaccaagggttggatgagtttattccctatctttctcttgagcaacgtttatggttatatcgtaacattgcgtttctggaacgcaatgcgggtaagaaggaaatctggcaacgtcttgttaagaatattcttacacctcgtggcattccgttgatcagttttactattgaacaaaacagttctaaaatgcctgagcagcatcgaccaaccgtcgatatgataaaacacgacgttaacttccctgtcgtacaagaaggccaagaaacgacatctgtggcagacgttcttgaaagggaagatgaccttgcaagagagaaccctcttgttcgtttcgatgctgagcaagatatcaccgataagatgagttccgatcaatacagttggcttagaactaaagttcttgactctgaggtgattgaccggtctaatagttctgtacgttcattaatgagcgtattgctgaacgaatggttacatttggcctcaagtgataaatatagggcttatgttcaaatacctaatcctaagactggcgaattcatgaccatgacggttaaagatgccttcattgtgatgatgtatacctatgccaaggctcgtgatattccaaccgataacatccctagtcttgtagcatatgaagtactaagagataagttacctacctttggtgaacttcgaccagctgttgataaacgtattatccctgaccgtctaattactgctgtgcaagacatggttactccaatgggtaactatatctccactgagcagttctatctggactgtgtccgtttacacaaagaatatctcctgcaatgggaaatgtattctttccaggagcatcctgctggccgtgcttattgtgagcaacttgtaaagttccattacatgcatcggatgtgtaaactggctccaccaaataccaagtttgaagattatttccgtagagcatctttcgatatcctcaatctaaataagactgaggcagaacagatgtgtatggattgcatcaatattgcaactggctccaacttggttcgtgttattacactaggtgaggtgcaacgtgaattgctacggttgatgggtcgtctatccagttatcctcttcaatatcttcgtaacgttagctttaccgatttccatattcttggtatggtaatgccacgtgtgggggatattacagtagatgccgctggtaactatatctgcaacgtcgctgttcaaaatgtcaaagcatatagaacgtcggcagggcatacgtatcgtgttgttgatgattctacttctccattcgtcgactacgtttatagtcaacaggatatgttctggattaatccatttgtagaagtgagagaccttagttacgctgacgcccattattacattccagtaaatggtgttaacgtaagtaatgttgttatcgaaactaataattcgccgaatacaactggcgacttggatcaatatcagaattccactgaccctaactggccgaaacttaaggagtaatcatgtacattacgagagactatttacagtctactccttggacatctataatcgacatgatcaacgatgcttgttttacccaattgtttccgggtagtactaagcttgaacagttcgaatcactgggtggtaccaagactcgtattgttataagtgtaaatcgcagtaaggcttccggtaacttactaccggaagtcgaactcgatacttatacgtacgatcgattagatttgacgacattttttagacaaacccaagtgcttgatttatcgaatgtggatactccatattccagtttaaaggttgtcgaaaaattatccgagttaaataacattgtttttgatgtagatgatttcgaacataccgagtataatgtattcaaccaagaattcattctccatgcgaataaaaagtctcttcgttttgtaggttttcttcgggttcgtttgattaatacgctacgaaaggaattatctactttcagtaaagttgaattccctgacgtaggtaaacctgacaatgttaaagctaatgatctttcactgatcaatggtacttattacatcactggatatgactttagtgaacatagagagtatcttcgtcatctaacaaaggctggtacccatccggatcctaagaagatggccgctattctcgccgaggtgacgaataaaccttggacagcatcaaagacaccagcttctcacaacatcgcttatactgaagaaataggggttctaaagtacaggatcatttataatggcattgtactacctcgatttagtgggcgtactgatatacaaaatgtacttgttatcgagttacataaaactttatgtcaggatgtcgttggcgaaattagaattcattataactaaggagtagagatgcacgttaaaaacatgaaatctaaactactccaacagtttagtattcagaacaagttggatccagctattcgtcctgaggatgttatttggactggtattgaaatatggttgcagaacggtaataactcaagagctactattcaggctgttgggacaagcaagtattttaaaggacagaaacaaatattctttaatcgatatcgaattgaagaagctctcaatggggttgttattccagggaagagaattgattattcaactatccatgatgttattaaagtactccgtgataaagtgactgtacccgtcgatactgatgaattcctagatggtcctctaactggtaatacggttattttaaaacccactactcgttctctagcctacattccaacttcacaagttgaattaagtttcgagaaataaaaaaaaataaagcatatcgccctctcccgaaggagagggctttatgttgttactcatcgccgttcaatcgaccatactctatcgatctctttcatctcgatcattcgtagagtagccccaaatacaacgacaatacacaacagcattgtaattgaagtaagggacatcttaatgaaatcacgtttgccaatcttttcaaatggcacgtagatgagatacctaaaccgatgatttagataaagagcaaagaaagcagcgagaacagctatcaggaaccacatgtgaaattcctgagtccacgtcaatacataaccgaagacagacatttacaccagcgccacgaaagtgccatctttaaagccaactttacgtttagcttcatcgtaccatacatcaacacccatgcgagccaggccttctacgacatatttatcatagttacctttaccacgcatgatggacttcagttgacgagtcaggatggtatggttagtggaaaggaacatacctggtacgtcaaggtctttaacacggagattacgcggtagcagcgactccatggaaatgttcagaagttccatgcgacggagatcttcacgcagagcccgaacattataaaccatggccagtctgatgtcaccacctttacggagatgttcctcggtcagatgtggcagagttgcggttggatcaacaatcactgctctttcaccagaactttgcacgactggatcgaggtaagggttatgtacaacatattccccattaacccaacgatacaaatccaaagtagaagttactttgtaagttgcctcaggatcaccccgcaaaggaagatcatcgacagtaaggacatcaatagacatactctctcctttgcctttagggagttcagttggactataactgctagcgtccattatggtttcaaagaaatccatatcatgttctacatcacgaattgccttaccgaacacttcacgatgagacggaatgaacatggattttacagcgttgaaaacctgattcattttgcaatttccttttgatagagtgtatttatatcacctctgtgatataggcgttatttatctttaaatacaggattatcgaaatcatcttcatagaggatatcgatacctacaatatcaaccacctgctcattgtcattcagttgatatctaaacccaactgtaagaggaagcagattataaagggcattcagatcacgggccaagggacctgctgcggtaacatccaaaatcaatacatgtggtgtattgatggtgttactatattgaatggaccaactatcaatagtagcacatacacgatttgcatctactactagagaacgaagaataatattttcaagtgaagatacttttacttggggatgacctaattcgattcctgtcaacaggagttcattcttcttaacaaaagaagaattctcccacaggtgaagttgactcaaaccaaatgcattttcaacgattgcttctactcgttcttcaccgagtacggcaagatcccggcgaataccagcgaccatacgttggcgcatttcatcgaaggaaacggttacccgatatttggcattcggtagtttttcgaatttcattactctgctcctagagggacatatagcccctcattagaggggctagttatcaatctgacaatatgtcgaatgtgataatttctttcaatacaccagccgcattcttgaggccgcgtacaccaagtcgcattggaatatcgttcttgatcatcgcatgcatccgatcatgattgggcccgactggacggatgtatacgttgaagccaatgagtttagctttctcatgtacagggtcgataccgagtactaaagctgcaccattattgcagttgatgaatgttgctcgtttgtagtctgtttcaatgttacctgtcatcttaggatgaccaaactcacaagcgatcacgccggaacgaatatcattgctaaacttactgacttcataattcacatgcatgtattttggaagtcgatctaaagcaatgaattctacgcctactccattttcaaatgataacatctcattttcctatgaaaaggtccctccgaagagggacacttatgtttacttcaggcgcttcaacagaaccgctttctcggtcagacgtccacgaataacttccatgtaaacgccatcaacggtgatcaaccgcatacggacattagcaaggccagatgccgtagcacgagtgatcatacctttcagcacttcacgaacagtcgggtgagttccttcagaaacaaggacggctttctcggtcagaacgttcagagtggccatctgttcaagagtccaacctacctggaagttaacgtactgatcggcaacaccacggatatcatcaacctcagccatcgttaccgaacgagcgataatttgagctgcacacgctttgatgatttgcagtacttgcacacctttcttgttactgatgtaatccagcagatcaccgatgtcatgtgcgaaatcactgatggtgatattttggatcgacaggctatctgccatgaagtcattgatggaatcggtcagacgatcattcaggaaacggaaatagcggatgctcagttgaccgcgatttaccatttctttcagttcggtagcaatcccgatcagatcggtatagttacgcagattactcagctgctcgaaggtttcatcgctaacatccatgtgatagatgctcatcgatttatattcgtgtgcaggcagtgtgatcgactgcgattcttcgtcgtcaccaatgttcaggagttcccgaacagcagcacgtgcttcagattcgttttcgagatcgttagcacccatgaacatcttattatcaagaatgatcggacgcattgccgccgcttcaccgagttcattatccttgacgaggctttctacttcttcaatacccattgcatctccaccgatagtagagatgggagtggtggaagcatataccacaccgttaggacgatattcacgacgacgcaggtcatcattcagttcgtgtttcaggtattccatttgcgggttccattcaatgaatttctcttttactacaccatcggggaacttgacgaagaaacggcaatagtgttccggatcaaccagaggactgtacggatcttcatcaccaacggtccgttcccaatcaaccagttgtgccggtttaatcagaattcccccagggttatgaatctcatcgtaaggacgagcgatgtttacacggaaaccagtaggttggtaatacatcggatcgatcatcacctgagatacgtcgatcggaacagggagatcagtatcttccacaacgggtgtattttgcacttgcggttgttgactgtacatcggttgttgctcctgttgatgggagtagccaccgtaaatatcagtactgatctcttccttcggcatcaggggagcagatgcagccggagtatcatcgtaatacgaactggtggtgctcgataccgtgtttggcgctgcgccataagtaccagcgggttgagagaaagtagcttgggtggttgttgcgaactgtcccatgttacctgggttaatgggaggcaaattacctgccatctggataccttgcggttgacccatcattcccatttgctgttgttggggacgatagttaccagatttgtacgcttgaatctcttggaggatctgctgatacatggcttgagcagtttgcagaccttggaacatatgttgcggaactgcacccatttgcacgagagcaggatacgatgcaacgcattgaccaaggaacgcttcatacatacgctgtgcagctttcggcggtgcatccgtctgactgtagttcttgcagacacacaggaactcaacgaaatccaccaggtgctgacaccattgttggaagatctggttttggaaccagttcgacgacagcaggttgtacgcgaaaatatgaaggttgctttttccaaccgacgattgcgcaagcccacggaacagaccaatagccatgagcaccagctgttggttattcatcaggttctggctgagttggagttgaggtacccggtcattgccatgaggcagattaccattaaaggtactctgatcgacttgttggcaggataccgggagttgagcttgttggttgtacatctgacttttcctatttgagaagtttaagagacaaaacgttgttgagctttgtcaataagttcacgatcttcttcacgtcgttcaaccaatccgtcgtatctaactccgacgaagaggtttagtcggccacgaccatccgggttgtttttcggttggtttttgtattggcccacctccgcgatcgaagcgtggattagacgagagctatcaccgattagtgatttgttgtgtgctttagaagtcttcgcgcgatcctgcggtacaaggatcgaggttactttaataaccttgctatcaccaggagacgacagtgtgtcgagctcaccgtgttcactggtaagtttcttaatgcacgtattgagtttgaatgaacgtttcagggcatcgttgatttcctgtccagtccactctttatctttacgaccttggaacgtatacgcaaacatggagacagcatagttaaactctgccatcacatacctaagaatactcaggcgtttgtcgtacatactagtttcatcaatgtcagtggcatacagatggtgtgccatatctgtcatgatcgcatatagcagttcccagatggtattgactttcactccaactgaacgaagttcttcaatagtcatctcatccagagagttgttgaagctatccaagtgagattcaatgttctcagcaattttaccttggtgctcgaagtcaccaaagatcatcagaccgagaatgattcgccatagctgtttattatccatgtagctcggctcgtagaaccggcttgggaatgcatctacgacgtaccagaaccctgcaacgagtcgacggacaaagtctgtctccttgtctttgggtagaaccagaaccatatctccagttggatgacgacgtttcagaaccgcagattcataaacgttccattgatcacgcggatactgggactcaggaaagtctttcagatatccaatttgaatatctactccagcccaacgcttgaacgtttcaacgacaccaaactcacagaagaagtaatgtgcaagacacgactcgatgtgctgccggttatccagatcacgtttagtgcgcttagacatttcgttgtgaatctgagaccagatcacatacatcacttcacgctgaccattacacatgtagtggtggtcaacttgcttaaacgtcagtttggcacgccggaatggaatgaagatactgccattcaataccgagaagccaacatcagtcaacaccggagagatcgaataggttgcaccattgagcgtacagataccaccatcacgaacatatggcaatagtacccttcgtgggaacatcatttcgcctttatagctagtgatcagttcgatcatgtacgtattactctcggcgatatttgctacacgcttagagccatactcacgggttatctcttcgaaatgaacttcgggtttacacagacggtttccatgatacttgaagtcagcagggaatagcgccgagttgatttcaaacaacttatcaacatatgcacgagttgcgttcatgcctgtttctgggttgatctccatcatgtgctttactgcaagcccattggctaaatctttatttagcttgggtatgacaccatcaatcctactgattacgtacgggtccatcacccctcctatcgctttcggaatatcttttcgagcaatgcatctgccttggctacttcagctaagaagtccacgacagttccaactgatatatccctaaacaggatgatatctctcacagccaaaggttcgagttcttcgtcgtatagatgtcgatggaacatatcaaaacaatccatacgtctctgagcatcttcctttgacattccttttgtactttcctttacagcttctctccattcacgtaaactggaatagatgccatacttcttaaagtctccaggtttgataacaatcgctttcgcattatcccgtcgtgctgcaaatgtcacattaccccttaggttaatatgaataccaacaggcatatctggcatgaagacaggctttacctcaagtagatcgctgccgaatggcataaatacactttcggttatacgctcatcgtctacgaaataagcaacagttgtagtagtagtccagatgatatcttcctgacggtagagttcatcgttcttcgagaagaaacaatcgcgcgggaagaatgtagtcttcttcgctcgatctgtggaaactacttgaacgttgagcgcttcgatccaaagcccataaggatcggtatcgatgtggtcaaggtcaacaatgaaatagaaatccagttcacatggcgtgttggttcctttgttcttaacagaacctaccagttgttccagatattcttgagtgagattaggccaatgtttaatcatcgctccgatattaagttctacatcgccaccccatgtaaagttgatacaaataacaagtctattttcaatacggttagtacccggtagatccaggacaatacctgttccatcgataatacttatttcatgcgtcgattggtttaagtaacgtacacgtttatcgacgagaccttggccgaagaaaatgttttggaaaacagatgtctgccatctgtccatgtacgatgtgtcaagaggacactccagtacgggatcgtcctcaatatgacccgcacgggaacggttgatctttaccatttaaaacaatcctatccaataccatttctactttacgtccttttggcctactccgttcttgactaggttcatatcgactcgtttgggatgctttcgaatctctatgatttctgtctccacgtttcccatgcgcaacacgcgttttacctttacccttccgcgtgttgcgcgaacgttgtttttcttcaggggtacctcccgattcataacaacggccattggatatattaacatgtcttatttgcttctcgaagcgattagcaaaatgggacatattctcatcctgggtaggatgaatagtagtggtggtttgagaattggtttggttagacgtattattactaaccgtagtattttctttcatgacgacaatgtcgccaggattcatttgggaatcagtgagctcttgctcaacatgatgcccgtgtgtattccagaacattgtctgatcctctaattagggaatgattcttcaataccgtaatatagatttgaaatattttttaatgacgacataaagcctctacccgaaggtagaggctgttatgccagcagtcagcttaacacttccgctttaccgctctaggcggcgggccactccgtcttcaagataacgggtagtaccattttcaagcttacggaaggtaccctttccagttcaaccttttacggcttcaaccaggggcttgttccactgagactcacccatcacttcttcgaagccagtaacgtcgaattcgagagcgaacgggatgttgttaacgtgcaggttgaacggaatcgcagcgatttcgcgagtaacttgctggccaccacgggtgatcggcaggtcggcgattacggtcgatacgtagtagaattgaccgaagctgaggatgtcgttctcttgcggagtcttacgggtcggaatcactaccagcttaccgtcgaacagttcgttgttggtcgataccaggtcgtattccaggtaagcgcccagggtacgatcgtcgcccttggtcatcaggtagttagcgatctctttgtccgagcagaacaggaacatcggacgctcgtcttggttaccggagatcacgcggaaagctgcttcgatgttggattcacggtaagccgggaacagtacacctttaacagcgttcaggattgccgagcagacgtcttcccaacggtcttgcgacttcagggtgtcgatcatgtcaggcaggtgcagcttcttgtagcggtaggtcggacgcattactgcggacagagcaccttcaacagcaccgaactgcggacggtcgaaaccgttagcggttacttctttcagctgagctaggtagttcagcaggcgcttaacagcgttgttgctgttacggatgttggtgttgacagtcagagccttaacaacttcgcccggaccttcttcgtccatggtgctcagcggcagggtaaccggagcatgcatcggaatcgggtgacggaattgcagggcacgagtttgcagcaggtgaccacgctgacggcggttagtgttggtgaagcgggtgtcgaggtcgaaaccaacgatttccatttcgccaatgctgtcggccagagctttaccatcgccagtttccaggtcgatgcgacgcttgtcttcgtccaggatgcgatcgatagttacttcaccgatggtgaaacggctatcgccacggctcaggctgatgtgaccactgaattgcatgctcagacgcagaacccacttacgttgttccagttctttcatgccagcagtttgtgcagcgtcagtagtgcgggttacggccgaaacagtcaggtcatccgaccagaagtcgatcttggcaccgcgggtatcaccaaccaggtccggctggaacactgcgcgcggcagacgttcagtttggaacttgatgactttaccttggaacttaacgtacagagccttcaggcggcccgacggatcgatggtatccgaaatgtccagcatgcctttgttgatcagcaggttggcgttcgagttacccatcaggtccagtttaacgcccggcttcagcggagcagtttcgatggacatgttttgttcgttgataacggttaccggaggcagcagagccggatcagcgaagtacttcaggttagtgccagcaggatcgatagccgggatcagtgcagtgcactcgtcgtccaggatggacggatcacgataggcttcaaccatgttgacttcttggttgtcgagcttctgaccggaaacagcgtggtaaacgtctttcattaccgcgatgtacggaagaacctgaacaacaccaccttcaatcgggttgataacggtggtcggatagatacgctcagcgaactcatcctgacgggaagcggccaggttataaccaacggtcacaacgcggaagtcacgctgggatttctcgttgtagttttccagaccgacgccatcagcagcttcgaaagtttggatcgaaccagccgggccgtcgaaacggtgttcaaccgaaatgacgttcttgtcagtggaagcaattttcttaccaacttgtttcagagccttaacgtactcagtggagttggacattgccagggcagccatggtggcagcggacagttggttttcgcctacacggctgttagcgccttcaaaggattcgaagccacactgacgggcaactttttgcaggctagcgtacataccagcagcactttgagcatcttcgtcgctcagttggccgaagttttccagaccgatcttactaatcagtttgctaccagcggacaggatgctgtcgccgtagtctttttccaggtccagtttaccaaggaaggattccatggagaaacgagtcaggtcgcggtcgccgttcactttgaacagagatttaaggtctttcatgttttattcctacgcaggatgggttttggatgttacaaatatcttgtcatcaaagctggtattttccggattcagccttgtgactccagataataagtgaagagatttgttgccattacttgctcaaatgggcaagctctagtcagctcgctaatcatactatcaaagaaagtgtggttagccttaattgtgagccggtcaggatcgcttgaaccagtgtgcagactcttctgcaccgcaacccaaagatactcatctacaggataaaggctataaacactgatataatcagaatcatttgccttacgcagagccatattggcaatacgttcctctacacgattgtgcaattcttgcatcttgaattgattatcgtcgtcggaggttgcctttagggcgatcccaacaaccggactgtcagccttctcgatctgagttccctgacagaaccggaatgggaattcattaattgcagcgtcgatctccgcaaggtcatttaccgagcttacggaagctatatagttggggcagagtagcttagtaaactgcacaccatcagctttgtactgatcatagactgcttcggggattacaagtaacttgatcatcggggtattgacctattgtgggaccaaggctattaagtgtctacataggaatatatacttaaattggtgacaaattacttaagataaaaatgatacacggtacatcattttaattttactaaaaggatgcggttcaaatgtcctccccaaaacagcttcttgtcagttgcgttactctgctttgcttggagcaccgcccagattctccggcctctccgtctactgaactaattgataaaattgttggttcacttgaaattaaagagactactgttgatcatgatcatggtcgacaaacttttcttgagcttcgtaaacttgttcaagatctcaataagaaagttaagcacgaatttccaagtatcgctgaagtactacaatctgtgcaagtgagctgccgtgaagagaactatctttacgaagctgtactaaatggtgttaatgaaaacttcccagatgggatggctatcatgcaccggattaactcttatcgtcgttcgcttaatgaatacatcaatgatgaaactattaaagcgatcatgaaagagtattccactaagcttctgtttaaccgtggtggcggtaatgatatcgctggtatgatcaacgagatgggagctaagctcgatccttatgtaaaggctcgtgctgaaagtcgacatcccgctgaaatgggttgccttgattttgacaacccggaaggtgtagaagaattcttcgaagctgtacaaactactttgtctgccgatggtgctttcaaactaggttggaaaggtttcaaccgtgtattgggtagcctaggtgctttccgtcgtggtgagtttattaccaccgcagctctacaacataactttaaatcgtatctggttatgttactgtttgtacatgtcgcattgtttaataagccatggatgcgtgataaatcgaagaagcctcttcttctatttgcaacccttgaaaacgaaatctctgataaccttctgactatttacaaatacatccgtgaaaacgaaacgggtgaagaagtcattgtcaaagatatcgataaacgtgaagctgctgcttatgtttgcgcgcgccttgaagagaatggctttaaagttaagatggttcggttcgaccccactgaatttacaattggtggtttcactaactatctagatggtcttcagggacagggatacgagattcaattcctggtagttgactatctgaacatgctacctaagacaggacttgatgctaaagtagcaggtgacgatattcgtcttctattccgtcgcatgcgtaactacactactcctcgtggtatcactttcatcagccctcatcagcttggttctgatgcactgcaactgatgcgtgaaaataccgaggacttcgttaaggtagtagcgaacaaaggttattacgatggttgtcgtcgtctgggtcaggaacctgaccttgagctgttccaccacatcatccgccataaaggaaaagcgtatctcgctattcaacgtggtaaacaccgtaacactgtaacggcagaagaagaccaatatgttcttctaccatttagtaatatcggtacgattccatgggacattgataaagaggaagattattctctgaaagttgttcctgggtctgtaattggcggcgatctcgattctgatgcatggtctatctaacgacataaatgccttcccttcggggaaggctttattcacaaattcacaagagtaaatatcatgagttgtattgacgcacttatcgataacctaaaaggttaccttcgtttcaatctacaacaacgtcacggtacttctgttctggtacatgtggcatcccaaaatctttataaggtccgctttgagatagcaaaactgtttatcaatgcattagaaggaatggatgtagacttcctcaccatgtcggccaacgagatcatggagaaaggagagaggtatagagcatctctgttctttagtcatcatctgcatatcgacattctccagaaagctgcaccttgcccagatggtgattttatatcagtagatgtatctaactactctaaatatttctttgatacagatccatgccaggaaggccaggcgatgttgactaactatctcgaagaacgtaagacctaacatactgctcccttcggggagctttatgccgtaaaaggctctacaacgcgtttatagagatattagagataaagcctaacatggtgacacttaatattagaaatgtcgtgtagaggctcctgagaggcaaggcgactgtgttgtttttaaagcttaattcatttggtatggcgatgtttgggcatcgcctccgttagatccccttcgggtaaaagcaggaataaggattaaagaagtttataattagaataaggaaataccttcggtattgtttattactaaataaaacccccctcctccggaggtaccttttcctcgttctacagattcattaaacacccaagtaaaacttctaaaacgataaaaaaaaataaactaagtgaagccctctccacaaagaagagggcaattgaggttaagctgctctagtaaacaaaagattactagagttagatttaatatgatagttcgatgatccgttaatccatttagcatcggaaagcttgttcacaagctgaccattgccaatgtaaccaaggaacatcttaccatcgtatacagcaactttgatttgctcatttcgcccatagacgatcggcttatcattgaatgctgttacctctagaccagtcaagtacccgtggtggggatctggtctagaacttgtttcaaagactttcattaggagtctcctctgcaagtgggcccatttgggcaaaaagtcaagcttaaacttgacgacatatagccctcctggttgcacaggagggctaatcttttcagaacgtacggtgttgttataatactgctagtgaaaatgcccacgaggggtaagtagctaatccgcagttctcttggacgacacctgctgacagtgtagtcgcgaatgcactgtttggaaccccattggtttagcggccaatggggatttccttttatgccgcttcggacttctgtttaacaggtttcttgtacttccacttgtacagttggtgcaggatgaaactcggaagacccagtgccagtacaccagcgacggctgtaccgacaatctcttggagagtgattgcattgaactcggtgccgaaaacaacctgagtaatgataatgatcatcaaaccgatcagagtggtgatccatagacgtggatgcaaggaacgactcagacgaagccctggagcagaaacgcgttccatccgagtagaccaggtgtggttacggtagtacatcatgtcagtgaagtaatcactgtagatgtgcagcagttctccacgttgatcaccggtaccatgagccaagccatggtaatagtaaataccaccatcttctttgtgggtgtaaagttcagcgttgtctttggtatacatcgacatttttattactccggcattccagtgtgcacaagagaattgaaacgaacatcgaacgtatcgtacatatccgatgttagttcctcgaagactggactatccatgaaggcttccagtgcgcggcgagccgcaagacgcttatcaccttctccattagctccgggataaaccgaattaccctcgccaggcttggcaaagccgtcaaagatatgcgactcgccttcacggtcagtcacagttgctttaacggaataacccatgtaacggagtcccattattcatcccatccttttacttcgtaccagagacaggcactattgtattcaacaatgtaaccgtctttacggaggatttccgcttgacgattattcatcttcccttcaactggcgtgttctcgttgctgtaatcgaagtttacctctgaatcaccagcgagcgcccgttgcttaattttagcatggattgattccataccagcttctttataaagaagttcacgcagctcttgtaatgtcatgtaactactcctacaataaagactcgactgatttcattgagataagcgagcactagaagaatacctgtccagatagcgatattcattgtagtacgcttctcttccaatccaggattagtggaattaactattcgatgacagaaagcaccgaataaaccaagacccatcaccacgaagatgatggtgaaccaaccaagatagatcattgctgttgcaccggggtaagttgtttgagggtattgatgatacggtgaacagtatcacgtgccaactcgcgattgtggaagttattggaaatctgatactgaagctctacttcgcccgtttccgagttccgatcgaaatcttttacagtgtaactgctatccaagatagcttccaccatttcgtcgttaagtttgaactcggcaatcgttggcgaaactaaacgcccctggagatttctgatgacctcgttacggaacgcgatggcgccttctgcaatctccagtcgttcttcaacagagatgaacgggttcttccagagttcggtttccattgtagggcgaacagaagctttctcccatgcgatgcaccaatagaaccaacgttcttgaatttcttcgttggctttatcgaatgcctctattgctttcttattgcggaaacagtccattgggcgagtatctttggggagccaggtgtcagttttctcgtaataaacgaaacgatctacacccggagtcactgcttggaattctttcagttttttgtccatgtgaaataatacctattggctgatagtatgtaaggagattacgcgttacttcttattcctactgctgggttagtgcccaaaacgcgcaatgcccgagacgaactctttggcgaaaagaaatgggatttagcccctaccttccggtaggggctttatgccgtcaaccgacaataagaccttcgatcgatagggtctcggtatcggcggcgggttgggtaagacgagttacacgaatataatccgtgtagtcatccagatccaaacaacagctgcaaccacgtactttgatcttggttgcttcgatttcgaaatcatccagcttgatatcgctgccgaagtgatcgaccatacgttgaaacaacttaccgaacgagaacgtttcgtactcgcagtcgatatggaggacatcaacagtgtccaccggtgggttataactactgctcatttgccatctccttacgtttatttttagcccagttcttttcatagccagaacgaatgaatttacccgatccagcattgagccaatagcgctcacctttgagataacgttcccgtttagcacgggtcaggcgaagaggatcgaacatatcctgttcctggcacatgaggcgatcacgcaagaagcagttgtcgttcaggatacgaaccgaatacaattgccccagtcggcagttcgccagttgggctttctcagtgcgcaacttgtgttcatatgccttagcatcttcgtaacgattgcgaggatgtttctttccgagtttacgagacattgtttttcctattttgttaatttacgaaaaatcttatcatggaatgtcattgccaacacgacacctatagaaccacctagaccactagatataatagcgggaagacccactatcacaaataggccaatggtggtcaactcaagggtactgataccccacgaggtgaagaaagcagcctttttataaccatgaaagatgtttctttgctgaaaggtttttacaaaagcgtagatgaatgatgtggctgtacttaacagtagtagtacccagataggtagatcgtgattaatgttaatcacttcccttgttcccactcggtaggttcacgtttagtacgctggatgttgtggatatcttccagcttataaccacgaccagtcgccatgtagatatgctctttgtcgacacgagtttggaatgcggtcagtgctttaacaggagcttccagagggaagtattcggtgttgttgcaatcccaacagaattcccattcattatcacgaacttcgtagctgttctcgctgaggtaagtaatattgatcgtgtgcgcagtcgcattctttccatcgaagtggtaggaacctacgttggaacgaatatcgatgcgcccgccatcgatggtgtcttggtagtagaacccacgctcatagaaaaacttcagcatcgatacgaagtagctattcagcactgccttagcgttagcttcattcactacccatttcccatcgacgatgttgttcaggtaatcacggtcgtgattgatcccgaagtcatcaacgatatcggcgtacagcttgtgatatttagccacctcatagagacgttcgagagtagcccagaggaataccccattgggctgcaagccgagaatgattcgacctacggcccacatcccacttccattcaccttatagtcttcatacagatgtcctttgatattagaaccaggttgcagttcatccgccgggtaaccagtacgaagccgggaacgaataacgttcagaacagcttcaccgttattgatgtccacaaggttaataccaaaggtagtccagctaccacggatacgtccctgatatgcaatacgaatggcatttccaaattcagagatgatccatcgatggtcatcgtcgatcacaaaacggcagccgttcttccacagtgcaaccaaattatctttggccgccaggatacgtttggtagcattatcctcggttgcggccgcatcgggtgaggtacgcagataagacaacagaagcagttcggcagcttcgttggtctgagtggaaaacatagcgcggttcaggcttgcattaatgatcatggtaatttcctttttgcggtttatgggtttattactaaataaaaaattacgatataaaaaataaaaaggggacccgaaggtcccctgttatcatgcagctacctgtgcatacgacagggcgttgcattgaggtttagtcggagagacctcactgaagaacattactcgatcgttgacgtattcacgggcgtgttcttcactctcgaagaacatacccatggacagtttatctttcacgttttcctgagttaccgggataccacgagcttcgatcaccacagaccagacacgaccatcggtatccattacggttacctgatggaagaagatcttggtcggattaggtaaggcagcagtagcgggtttagaccactccgctacagtacccagagctttgacctgcatgtctgcggtagcgcgttgatgcatccaaccttccacagtcggtacaccatttttcaggatgatgatatcataccagcttgcgttgttacgcacgacgcagcgttcgtatttgccactggcattgacattacccatgatcagcacatcgtgaagcggaacttcgatgtgagtgatcttggaagtatagtcaggaatcagtcgatcttcgacctttacccagttagctgcacgggggtgagtcaatgcaacgcgaacaacgcctttgacggcttgttctttaagggcagccattaccagaactgcttgaacgacgtccataattactccttaatgcatgttttctattttgacaatatcccactgcgacaattcagtgtcacgatagaacttttgaagtgcctcttcgattcccatttgtgagggagcctcccagacagtaccattgtaacacgtgattttccagagcatgcctattccttattgaaagttcttaggaacgaattatttgataacaaccgcttccgagagagtttccatactgctgataaccagtttggatttatcttcgtcgggttcttccattgcttcacgcaggagttcaccgatggttttgggttgaacgtcatcactgatttcacgagaacatgccgaatcttcatacatgtcagtcatctcgatgtcgtcatccaaaccagagtcgtagtacgagtcttccatggagtagcacgattcatcagaagaatccgaagactctccatacatttcatcgaagtcacgttccatttctttttcgtacatttcggacattgctttgttatcttcttcctgcgccttacgacgagaagtcttgtagaatggcagcaagcgttgcaggactttatggaacttcttcttgctgatcaaccagctaccgaaataacgagacagttttacttcagctgccttgatagtcggatcagcatacatcgctgctaccagtttctccagatcgtacagatgatccttcgaagggttggtatatgcaggatgctcttggagagcgaacatcacgaacgtacgcatgtcagtgatgaagtactggttgtggtgcttgttgatctcgacgtagaccggatcggtatgacgatggtagtcgaactcctcagcccaggtcaggttgcgaaccttagtagggcgaggaccttctacccaacgaacagtcggatgtttctcacggatgttccaaccatgcgcatgatcgtactcagtcggttcttctttgaaccaggtgaagttaccttcgccacgttcgaggatctttttacaccagctaatgttgatgctgtacttgcgtccttcgatcaagttgcagggtttatccagaacagcgacatagctgtcatgaccattggccacgataccaagaacggtagcttcgaaggtttcataacgctgaccgggatacacgcgttcattttcgtccaggaaacggagagaacaggactcgaagattgcacgggtaccagcagggaaatgagcgcggccgaaggggctctcggctttacgttccttgcgacgttcgataacccattccagtttttctttggtcagacgggtggtgggttcgcgatattgtttcatggtaatttcctttttacatttgggtttagttgagtacatctcaatgcatcctttccaagacacattgagatggggtctccgaagagacccatctattattcttgggtcagttccccaagacgaccttcggctttcatacggcggatctccgaaatggacttaccgtattttgcagccagttcctttacggtgccttcaggggcaggtttactcatgttgcgaaagttttgcttggcgatgttgtagttttgagcctgaagagttctcagctcagaacgaaccaaagcattgccaatgcactgagaggtgaaagtgaccatgaaagacttcagcttatcacggtacgtattgacccatgcacaggattcatccacgtgcgtgcacatgtactcggcggctttggcatattccaacaagccgactgcatctggtccaacatcctggtaaaccattttgttgaaaaggcccagtgcgatatcagatgcacgttcagctgtaatgaaatcgattgcatcattaatgatcaacgtttccagatctttgaacttaaccgcatcgtttttgatcaacgccagcatagcgtcaacctttacggtcaacatcatgtcttcattacgacgattgaccagttcattggtctgctcttgggtgaacacatggtccacgttttggaagactttcgacagacgactatccatttatttatcctcatttacagtgaatgcaaacatagtacatttcggtttagccggatgttgacaccattccttcgaaaccttaccttcgggtttggtcagttcataatagaactcaccgcaagcagcagcgagtcccatcagaactgcaagaaaacctacacctattttggttttcacttagcgatgatccgttgtacgaaatgttggagatttgcaaccagccgatcgaactcttcctcggtcagctgatcacgatgagattccagaagtacttctacttccggaagaacgttcagagcgatgtccagctggatacgcgaaatgaactctgcgacatccagttcacgatcacgcctgagccgattcaccaacttgcgatgttgatcactgttacggtaggccgagatcttatcgataagaatatcggagatactgctttcgatctgttccgctacagttcgcccttcttccttggtggttgcttttacggcgaggatagcagcaacggcggttgcactaaccgccaatgcaatgagaccgtatttaacgtaggtttccatcctattacccccaacccatttcggatttgaattcatcgatgcgtacatcgaatgcagctttgtactcaccgtcacgatcacgcatttcaatagccattttaatgcggagactcaacaggccctgagagaaacgcagacgagcagcggtatcattctcgatcgcagctttacgtgcttcttggatcagtacgtccaaccgcttactgaaatcagcgaaaagaatcttatcgttcagactcttagccacgatatcagtaccgatcatgacaccagcgacagccagggcaacgccaagaccaattgccatttctttgaggacttgattcatttgtatattcctattttcgaatttgaagtgagaatggattaacgcagttcagcttttggttttgcagtttcgtccttggtcttacgacgctcttccatccagttgttatggtaagcagcaacgccgacgaagccgacaacggctacggcgatgagacccaagctgagtgcattttctttaatgaagtccatgactattaccctttcagaatggcatccgaattgaagacgtcgggaccaaccgagagacttcccagaagatccggagcaaggtaaacagagttgagggtttcgtatacaccagcaacagtgtctactttaaccaggctagaactgcgcagggatacccattcaccgttacggaaggtttcaccgaccagtacacgaacatcatctacgtcagtgcgatttggccatagatccttaccttccactatttctacgttacgcgcatggtagaccagtttaccattcatgcgagcaacgatattcggacggcacatgttgtcgattactttaactgctacggacttttccattttttatctccttatttagttacgagcatttcttggccattgggaccgatacgatgaccgagaataacctcggattctttttcaactttcggagcttcataggaaccgccgtaaacaacagctgcaccgagaaccataccaaccagaaccattacgatagctttcatgttgagtttccttctctagataggggtattatcacatttgtaatatacgttttaaaaagacttaaatgtacattcgaatatgataaaaagaaagggctccgaagagcccttcttattacagtttacgcaggaacttgacaacttcatcacgcagttcgcgcagagttgccgtcagcagaatacgttcttctgcttcatggatcaggcgttctgccagatcggacagttcttctttacgtttatcgagatcgtaatccggcgggattcgatcattggcgtcacgcagtttctgcatgacttcttctgctgtgttctcgtcggtccatgtaatggcgatcatcgagattacaccgccgactacaacacaacccagaccttttacaaaattaccgaacatgttactttccttatttgcagatggggttattgagcagttgtttcttcagccggagcagaggtatcctgttcttgaacaggagattcagctgtggtatccgtggatgcatcatcgccagttggttcgacaacgttgtcgttcagagtttcatacagcttacatgcagctgtaccgagagcgataacggcagccagagcaccagtaacaaccagaatctttttcatgatggagttccctttttaaggtaggtctcgatagatgacctgtttgatataatgatcgacacgcggttcagcagtctttcggattggctcgtattcctgatctaggatctcacgaacctcttcccaacatgctttacgtagcatcgcgtagcgtctctctggatcaccaaagaggtactgactcctacggagcaagacatggtgatagctttcaacgaccttaccggccttagctacgactttattaaccatgtcgatatgcctttgcattagataagctgcaccagcaaaaccggatacaattatacctaatgcaacggcaccaacaacatagcgggttttcatgcacccactacttcatcgtaaagagtaccagcaatattcattgccaggataccgacagttacgacaaatacagtttttacgagagtgttcatgtttattctccttgagcagcattgaatacttcatcaactgcccaacaggcagcattaacaacgatgatacatgcagcgagttttacacagaagcgtgcgagtcccatgttgatctccttgatctgttgactaatatcacacttgtaatatagcctttaaattggtttgaatgtagtctttagactacggacttacgagcgatgcgctgaagcagattctgatcggtgatgaaatgaccgagaacacgatcaattacatcgtcggccacatgttcgttgtgattacttacttcattacacagaccactcacgagtccagcttgacgaagtttactttcggtattagcgatcgacttaatacgatattcgcgaataacttcaacgaactgacgttcaccggctacgaaactactcttcaaactagagtacctgagaatgttctccatcttaccgatcatgttatccatagttttcatgtgccagcgccagatatccgatttgatccctttagctagctcatgttgacggtgcatgtaaattgcataagccatgtaggccaggaaagcgattacacttacagctacaattgcgttgattgcgatattcatttttcaatttccttttgggtttggtttgacacgacataaagccctgatcgaagaccagggctttttaggtttgattaagcaagggccgccatccagggcggtactacgaccaccatctcgttagggatatgactactgaacttttctaatgtttgtttaacatcaggccatttcagcatgccgtttccgcaaccgagcggtggtactacgatcttccacttagggtcgatcccatcttctacatcaatattgtcgactatccattggaggccgtcattgatatagcttaactgcgaatcatcttgccaacgatctttcgttgggaacatcatgtaacgtttaccatcatcggcaagatagatggttgggttaccgatggtgatgattcgatacttgcaatcatgtttatatctttgatacagttcagggaacttctcacggaagctttccgctaaacctgtacccattacgccacgggtattaacagttattaggtaaagatccccaggctctttaaaaatgtctttacctatcacgaattcagccatagtcaatggctcctttgtcctacaaaatctaatggtcgcgaaaccacaactcatcagattgtgcaagattaggtgaactcattcactgccttttttaccgctatagtaagggtaattgcagcggttattaaagcaataccagcggttgcatattgcataagttcacgattgtgggcgtactcacgacgactcttttcgttttcttcgtgaggtttattatgatcatagaacatggtttatccttagaagccgttgaaaatgattgttgcaacaagagagataacgaacacgattacaacatgctctagtttaacccagctcggtgggacattgggatcactcttattggaacgcgggaacatttcttccttagcttgttcttgcataaagcacctaatataactggtttattcccaattgtgatatagggtttaaaatgctttgaatgcaaggtggacactcacgaagttctataatgaacgcctctatattcccttcgtcgttgcaatatgtctttatagtctcgatttcaccttttaagctattaaatgctaatcgatgaaagttatatagttctttgaaattaccttcaaagaaacttgtatcgattggatagcgttgtagttccataaggatgtattgataccctttattgaactctttagcgttgtggttataaataaagttgtgctgtagtttcacatactcggtggctaaagagtataagtggtttactacatctattgaaagatcgatgaatccttttatagatccaataaagttgtatgaccaaacgtggtcaatacgaaagaacacgttctgcatatggtcctacctaaataaaaacccaccccaattacggggtgggctctataccgtcttctgttacttcgaagcgattaatgaaaacgcccaatgtgactttaccgacgtggcgattgactgtggccccagcgtcagctgatctacgttgttcgtttacacctaataacacgccgtggtatgttttcactcggttatcagatattgtctgaaatttaacaggcatccccggatagagtaaatcaggattaccatgtgtccattccaatttgatctcttgtccttgctttctagccatatccgtatattgcttgaaagggttagatgtcaatctatcttttgcccagcgaacgttattgaatcctgtttccaaatccttcatcttgacttcgaacaagttagtagccctatcaactaacattttgttgtctttgtcaattgcaaagtcttggaatactttacgagcatccccaaatcggaaagagttaccattctgaagttgctcggcgagtccttggtcaagtgaagtcgcatcgccagtggctaacactgtgatatggcgcatcgtgtttctgaacgtcttctcggcaccctggtaccgatcattaggaacgttgatcaagtttagcacttttgtattctttccataacgagttgtatcgtaaagaggatacaagaataaaacctgattttgtatataacgtccaatacccgtagaatagattcctccttctttatcttggaagaatcgatgaacgtctttcaaaggcattccatctgggatgataatctgattacgttcttcttgactatatccatctgcgatatcgatggcaagtaatctttggctatccgagcctcccactaattgcccaaattgcgtccacagtgatttaagagcattcattgtggtcgtaactcgatatgtagtgccacaagttaccatcatcagtttatacgtcagttcatccacaagttgcatctgtacgctgatcaatccgatctggttcatcgcttctctggatttaagattagagttctttcctgacaaggccgggttatcgtcaccactaacggaaataatccctcggtaacgtttggtaactgctttccgttcgacgttacgtgtagctactgcttccagtagaggtatctcagatacatcgacttgtaggttatcgcgataagggacgatatcatggacatagtcaccataaccaattaagaactgaacctctctgatatcaccaagttgaccactcccgtagtctctattcaaataaagaaaatcaagacgtacaggagtaatccactttttattagcaaggattttaatctcattgcggaagttagaatagctttcaccaatttcggtaacctgttcgacttcacgcattaaaagcgtactatcgacagacattattcagcctccacgatgtaacgttcaatctgatctacgatagaaacgtatggctttaatttaccttcgacttcactacgtgcctgcaaccacttattagtggatgccaagttacgacgacggttcattgccacaagcgagtcaaatatttgactacgtacgtcttcacgcggttccagctttttcgctagttcataaacctcaatagcaagtgcttcgaaaagacgaagatcttcaataggtgggaaaccagctggatgtgcatggaatagagtttgttctcgccagtcacccagatgtttctggatgtcagcatagatctgcacgcagtctttatagttaacgagacctacgctatacccctcacccatcatcattgcaataccagcggctgtttgttgaccacgggacatttgcgatacacgttcacggtcgactagtcgatctcccgttacgttgatatggttattacgtagatagttagtgctataagctgcaagatctggtgtaacaacttcataacgaagatggaacaaacgccatgccgcagtatatcgttcacagagttgcattggagattacctcgttgcgtatttaagtagtgctatcaggacagggtgataataaaatcgttccaaattgtcccacgaaaggcaacatttcgtcacttttcttaattggttcatgtccataggttgacgattgatcatttgccaagttaacatttccagtttagtctggagcttggcatcttccgtataaaaggcttcggtaaatacatagaagttatcacgaactacgggcgcgatgtcagccgggcgatcccacgcttcatcttgttttatgacatctggatcagcacgtttaaaccattcgctgtttcgttcttcttgcgtcttatacggtatttgaggacgacgtggttgaccttcatggaacggaattccttctggtcgagcacggtcttcaccatcgtattgtgaatccacgtcagttggtccctcgatagggaacacgaacctagggataccggtataaccaattgcctgtagttctggccgccagcgggagattctagtagctacgagatgtgcacgttcagtagaaccgcaaagacgggtagcatcttgacgtaagatagcatcccaaatagttggttgcttcattacaggttcggacattacattcagtaacttaacattcatcatccgtcgatcagttttcatgtcaaccatcataaccatcgctttagttacaaaatggtcataggttttcattaactgatctggtaccaggaatgtactatgttcaacagagaagaaatcactaatgtatctccgaatgatctctttacgaagagcagcaaaatctttttgatcttgttgttcttgttcagtaacaaacggaccacaaccactagtaagagaacttgcagaataatagtaagtgattatagtcttacgttcaaggtcttctacttgttgttcattaagtttactcaccatcttccattcgatagcgtatgtggaatcacgcaagaatgtttcacgacgagccgccgtaatagtgaatagacctagtacaccatcaccaatgttaccaatgaacatatctccaacgttaggaacgaggaacggatatgtgtgtccggcaccagtaacagagaatgtacgaatacgttcatcttgggaaatatctaaagattggttaaccttaagatccattcctttaatgcaacggtattgttgatatggtggttgacgatggagagccaggggagttggttcttgagtttcgtcaagaatttgtgagaaatacgttacgttccagttagaaccatttatccatgcaagcatcgaactttttggtacgaactttgtatcaatggcaatgccccgataaacctcggggcgtgctttgacagtaacaggattaacttctggactctgaggagcaatttcttcctcatctacaaaaagagacatcgttaactcctaatgtcagaaataatgtgcgaaaataatacgttcaatggaccgactttgtgttgatctatataaccaccactggctccaacttctgcgatgatcttgtcttgctcttcacgagctttagcaatatcaccccatttcacgataccacgcttaaacgtattaggcaggtcagacgtgattggtgtagtaccttcacctggagcatcgggatcttctggacgaggaccacttagacccagtagttccattttctcgatcgggttacgaccaatactaacacggaacaaccggaacagactccagcaggtagttggataacgacgaatcatctcccagtacttatcatggataccatagaagttcttagagagactaatttgaatgtggtagtacttcaaaggatccagcgggatggttgttctcagaagagtagtcccaggatcaattgtcatcggtacacgtaaccgctcgttattttggtacaaccggatttcaaagaaagagccatctgcgattgcagctgttcctagagtctggataaactcaagccaatatggattgaatgtaaatcgacctaggttcttgaagtccatcagtgatgtcaggtcatctttactcaggcacaacaacccattaaagaatgtgaagcggtgcggtggaatttggtcagtatgccaatcatcgatatctggatgctggatataaggtagacccatatctcgcattaagagaaattgatgatctaatgttccacgtaaagatgtagtcttccgatcaaccgcttgataattctgatatcgatactccggtcggaatactttaggaatagtacactggttcattaggattggatagttaacacgcatatgcgtaggtcgttcataacgacacagatagctaaaattaacagtgtatccaccagcattatcagacgacttttgtggcgtatctggagatgtactaaagtcaaaccaaccgaccacatcaacttgacgttcgtatatagaaagtgtaggatgtgtacttgctagagtagccatttcggtttgaggttggcaccaatgtttctccatccactcacggaaggttagatcggttggccagtttgacttctgcattgtatcatacagtcctttcatcaaacctaaaagagatggagggacattatagtgatacgttagagacattgtcatctcagcaccgccggctgaacaacgtatccgttgatcgtctaaccagcgttgagccagtaccacgttaggtgcctgatattcaatgtctatcctgaagtcaacaaaacgtcgaatcggtcgaatagtaatatcatgaacatcatcaacgaatagaggaaagttctcgttgttataaaccgcagttgaaagagtaaagttctcttcggctatttcttcatatgcaactgtaatacgttcttctgggtcaaagtgaacagcatcggctgcatcgcaacagttaccaaacataccgtcgttcataggaacggtatcgacacgtccaggtaggtaaactcgggtagcaccgggtaactgcatcattgtagcaatttgtcgaatagcatcgactgataccttccgcattacggtttcgtatacgtctggcaaggggataattgcatggggcatggtaaccacctcatggtttaagatcataagatccggcataaagccctgcctttttagggcagggcaatatgttgttacttacagagctttacgaacaacactaacaataccatctgccacgtcaagagcatgctgtgttacgaacttatacgcatccacatgcgcgtaagacactttcagcattgcactagccagatcatccagttcagcttgttcatcccaacccgatgcacgggaagtagtatcgaactcactggagccagtgctcaatgcacggttgcgtgtaacgtcgagattgataatgtcatcgatagctttagaaccaacggaatcagcaagcttatcagccagggcgacgtatgccttagccatcttaagcatgttcgctagatcagctttggtcacatcgaaactaacttggcgatcctctactttgatcttcttgaagacaggtaccagagtatatgccaaagcctcgatcttactatcgccaccgcgtgggcctttctcgtattcaatagcccaaccacccatgagagcgttagccatgttttccggatacttggcaggtttgatattcagagcagtcttaactagcggaccagtcttatcgtaaccaccttcagtaacagccttgttgatgacacctactacttcttgcagtgcacgttcagagtctttaacgcccttaacagcgatctcggaagtgacacgaagatcttttgcaacagcttgcacgaggttagtttctttggtggccatatcgctagaaatacctttaacggtttcacgcccgatattggacttaccaagtttagtcagagcaaggtcgacatctttgttaagtgcttgagaacgcttcttaactttagtaacgaggggaccttcccaccatttaatcaacttctcgttcagtgcacgcttcagaccggtaatacgactaaggaaaccgcggaaagactcaagactagcagcatagtacttatcgagatcttctttaccatattgctccatcgaaggaacggaaggagcatagtcaccaaatgctttcttgagttcatcaagtttaacttgactcaggataagagtttgaacactatagctttcttgagagagaccatatttcagaatctccatgaagccttctacagactccttctctttctgaagatcttcgattgtacgactggcatcaatcgcttcctcttcatcagcatcggcttcttcttcggcctcatcggcttcttttacggcttcggctacatcgtcttcagtgacatcagtgtcaacgtcctcgatatccagttcaccttcatcgaagttagcttcaccgtcatcatcgatttctccatcgggttcgtcttcttcgatctcttcgaggactggttcgtcttcagcgacatctgtagtctcatcggtagactcggattgatcttcgacttgttcatctacaacctccgcttctgtctcaacaggagtttcctcttcgttgacgatgtcttcttcaggagtttcttccacttccgccggtgtttcttcttcgacttcagtttcctcgactactggttcttcctctgctggaatttcttccacagtagattcttcagtttcagtcacttgttcttcaactggagtttcttcagctggaatatcatcagtggaatcttcagcgatttcttcgttgacttcttccgtttcagctacatcttcagaaacttcttcttcggtagtttccgcgatagactcttcgacttcgggtacggtgacttcgtcagcgccttcttcaacttcaggggtagaaacaccatccacctgatcatttgcttcggtttgagcttccggttctaactcaggtagttcttcatcaccaccctgagtttcaccaccttctacagtggccggctcagtgttgtcgagttcaggggcagcatcactgacatcagctacttcttcaatctctgcttccgaagtctcttctacttcttcaaccggggtttccggttcttcaccgatggtatcagcggtagcagtttcaccaccgtcatcgacagtagtttcggtatcaagagattcaacatcgttagtcagttcggtttcaccagcatcgccgctattagtgatatctacgttttgttcaccagtagtatcttcagcaggtacagtgttaccatttacatctgtctcgttggcttcgatggcctcagcatctgccgcggctgcttcaacagtttcctgttgggttgcttgaatctgttcggcctgttcagtgagttctttcacttcggcagcttgtgcttcttcagcttgagcagcagcggcctcagccgcagattcattggtagtagccataggttctggaataccagacggctcttcactggtttcaccagcaagaggttcttctaccgtttccagatcaccatcgggttttacttcttcagtgggggtagcttgcgcaagttcatcgcctgcttcaactacatcgctttccggttctgcggatgcttctacattagtagcatctacagtttcaacaggcttatcttcaacttcggtggagctctcagcgaagtcttcaagactggtgatatatttgtgaatgttcttcaacatgttgtttaccttctgtacagaatacgagtagcgttattcgtcctaaacgctactcatggacgaaacactgtttcagattattgaacgccaaggcctacttaatattggaacgacatacattaagaacagcgttaagattacgcccggcaagagccaagatacccaagtaaggattagcaagccaatcaatgtagcgctcaagtacttcaacaaaccgacgtagaattgcttcatctgcgccctcaacttgatcattgacaatctgattacgaatacctttgacaatattcaacattgatcgaatacgttctttccgacgatgacggatactcataccacttgcacggttaaacatctcggccatcttctctacttggcgcaatacagtaatctgtacaggtccagagaaatgttgaaatttaattaaatctggaaggggcaaaggatcacgttcagagttatctagtttaacactgatacccaacattcgatctataccagttgcttctggcgatttgtcaagaactacgacctgataattacccatcaggtgaagagactcatgccgatatccacgatgactataaagtggattagaagaaaccattttaaccgggttggataacatgattgtttcaacgaatttatttaattcctcagcggttgtaatgcgctgtgggatatggaatgctgcacgaataagttcttcattattgtaatcaaagaactgtttcccaatttgctcaaggttctttaggtttgcaatcaatccctgtacttcattgatggctttataacgaacacaaagattttgaattcgagtagtcacatcaaaggtcggttcctttgaacggcgtgcagtagtacgtgttaacgtattaagttcttctactcgaagaaggatattgtcaaatgctagagataaagctagactaccatcgaacatatcttccataattcgatttagaaatgcaatgactttatcaagaatacctacaacggttcctttgaaatcttcacaaccgagatctagtagatgtgattctctttcaaacattggataattttcaaaaccaccaattagatcaagaatacgattagcagtaacttcatctttctcaagtagcgcactcaatgccgcaggggagtcatcgaatacgacgatttcctcgggtggattagattccacatctaggggaatattttctgtttccattgttaactcctgaacataagacgggactccgaagagccccgtctatgtcttagtctttagccggctctttatgcagcttagcttcttgaatataaacagaagcgtatgcaacaacagtacgggttacataccggatgatttcacgagaacgcgggttggattcacgaatcagttccagtgcagtctgagttacttttcgagcagcagctttagatgcatcgtcgagatcttcattgttaagctgatcttcgattttactaactgctttcttaagggcttcagcaccttctttgatcttaacgtgttcatcgcgagctgctttcagaatctcgatgatatcgcgaaggcgtttcgtattggtacgcagagtacttggactggatactttaacttcaaattccgccggtgcttctttggcagaagtggctggaccaataccgtaaacgataccgtctgcttgaagttcaacacgcatgttaccagggaagatatcgtagtttgcaccgtagatgtcatcaagaggagcggtagctttgtacaacttctccgacatctcttcgccatcacctttaactacgttataaccgctaataagtttagcaaggttctcgtagtatttcttaacagcggccgggtatacgtaagccgagaaatgagctagaccactgagaactttggtatcaccaagtttggatttaccattcgcaaagacaggtgccggattgttaagaacaaaggtcttacctgtaccggtccagagattaccaccagaagcaagaatctcttcgagttgagtgacaactttatctgctttggagataccgttcatcagattatcgataccaccaataatggcgtcaatgatcttctcgatgatttctttcagtttctcaaatgccttgttggcgtattctttaatatcttctacagaaatttctgcacgaagaatatcagaacgttcgccggcattatagttttcaagtcctgtggatacttgattagtaccaagaacacgttcagcttgtttaataccaacacgaaggaatgctgccgtctgttgagaaatctccccacgagcttgacgcagtagaccagaatacgcttcaagggcatgttgcgtttcaatcagttcatctgcacgttgttcaaggatttctttttcaacgtgagcatgcgatacagcatcgatttcaccaacagcttcagtaacgtcaactggaccttcgataggagcaaactcagcaggtacttcaaccggctcggtttctacaacagtatcggtaccaactgcaccaatttcgggtacaggtgtcggaacgggtaattcaacaggagcctcatcgaccacattggccggtgcttcgatgacttctacttcttgtgtttccaaaggagcttctgcaacagcagcaacttctggagtaatcggttcttctttgaattcttctagagaaccgacgtatttatgaatggatcgtagcattacattttcctcggaggagaatcatcgcgcgatgatgattgttaataaccatagaattggttaagaggtcgcactgagctctaattcacacactttatttcgaatgttagtgatagcattaatacgtgcaacaattggaccatagttcggccgtaatttcggaataagatccattacaatactagacactcgatctagagcatcccgagatcttttccatactgtctcaccacgacgatcttccaatgcaataagatctttggttagacatttcatttgctcaagtaccttagcttcctctttaaagagttcaccaaggctatttgtaacgaccagattctgtttaagagtcttttggatttccaatcgactgcgcactggatgttcatatgtttctggcccgctggtcatatcctcatcatggatgaccattggtagaagagatacgtcgcggaaatggataacatagttacccggtagaacaacatctttgagcggatgaataatactggtatgcttaccaatgaattccgagttcgcttcaaatgtcgtgatatcaccagtttctacatcgtaactcttaagggacttacatagccgattaatattatcgacaaggtacttcgggtaagtattaatgaagaacttcattacagtggtttcagctttgaaatcatccaggcagaactcagagcctgcaaaaagcttggaagctccattaacagtgatagttgtaccgttgtcatggaattccatactggctttcttattgctgctctgttgagctaacttaagaagctcttctgttttcttttcagttgagctgataccagagataacacgttgcgcgagtagtttagcttcatcgattatcttttcgatgagctcaaggatttttctacccacctcttttaaacgatcaactagtgactcttgtgaaatagttggatcagtaagaagtgcttcaatcgatacacgttcttgtttaccaagaatacggtctatatgctcaagaccaatagccatgaacttacgagtttgtaaacttaggccatctcgacctgcatcagttaattgatcaagataagcttcaatagcgatatgggcttcaaacaaatctttgaattcttgttcatgatcattgacgatcatatccggaagttcttcctgaggactatcttttaattgcgggcgatttgctggattctgacgagtgtccattttgatttctcgttatgttaaacatagaatttggcatagcagtcataaagccctccatagggagggcatttatgttagtacttagttagctcgtgtttagcgatagctagtttcgcaaaaacagaggtaacaatctgacgttcaacttgagcaagaacatcgagagaacggatcttagtgattagacttgtgatggcaccaaatacagctgggtcgtccagctcagtcactagttttgcaccgagggagtccgatagctgttgaagttcaccattgtgccgatttacagatgcatcatcggtcatgacagctagaacagtttcacattcctgagcaaatttagtgatagcacttgctggacggagatcaacctcaataggtccattcgagtcagtaccctgaataatcttaaagcctaggttttccatatcccacgaaagacggatactaccgggtaggaaatcttgatcgatagaggcttgaacaacttttgtcatttcactgtgggtgtgatctagaacactttcaatatattcagaagcatcgcctttaccaacattatctttggcaaatttcatcacggacattagtgctttgggaagacgatcgtagaggaatacagcgtaagccttttcagttgcgatggtgtcgtatgtgttctccccatcggcaacaatgttagtggtatcttcaatacgaatcttcttagattcttcgtcgatatcacctttacgctctttaatctcagcagctttcttcttaagatcttctgaaacattttctggaacagagccacgcatcttaccgccaggataagcagggaaggcacgagaagcagcaattagttgttgtgctgccttttgtgttttaactttaggaccagccagtttttggtaaatcgccttcgcccgttcaatcagcctagcaatgaactctacaatgcgcttaccaagctctttaacgcgctctttgacatcttccatggaaacagtagtggtttgtagtccatcgcgcatagtgcacgttttaaagccttccaggctaagtgcttctcgtttgatattgagtcgcgtatcaatctgtttcatgccaattcgcatcattgcagcagattgtttagtgatacctttgtcaccagcttgtttaaggagttgagaataagcttctagagattcagcgacaccttcgaggtcttcggattctacaacttcttgttcagctacatcgttttggaaatcagatacgtcttcaatctctacctggatatcttccgctggttcgatgattgtttcagcaggttctgtatttacagtacagggcatttcagtgtcaagcatgttagcctcgaaatagaattagtttacatagcataaagggagccgaagctccccatgctttaacgggtggaagcatccatccagttgattagaccgcggatgtaagtgaaatagaattcccactgaccaccgccttctttgaagaatgtggcttcgccatcatcagcgaattcagcaatcttactggcaagcttaacacaccatttctggtcttcacctttagtgtacgtagcaatgttacggataacatccgtgtacttaccggaaccttccatgtgcgctggaataaatcgaccaaatagaccgtactcattctcaacgttgaaagtatcccaccactctttgcccatagatgttttccaatagccagtgatataatcaatagctttaatgatctcatctgcggctgaggctacctgttctggagtcattgcaggaagagtaacgtctacgtaagaatgtgccataccactgttatatttaacgggtttgaacttattcttatcaaagcttggcatgccgtcgtacattttctgagtcttctcaggatggttacgatattccatcttgattaggaagtcagtatatggcttaacggagttagcagctcgggtaaacacagctgcgttaccacgggccgcctggttaagttgaccaactgccttagcgattacttgtttgaagttatccccaagagaaggatctcctttgaacttaatatcgccttcaatgaaacgacgattcttcagccaattcggatcaccaaacgttttagagatcttgctcttaaccgcattgtactgctctggcttaagatcttctttacgcccatgaatcatagcgttgaagaagtgaccgatttcggtaaagaggccttcattagagaatacgaacggatcgtgagactccatgccagcaccttgcactttaaggttctcaaggcatgcttcaagatacatggctttaccagaagacgtataagtaacaagagcagttaccatctggagattcatctctttgatcatatctgctacagctgtaacgtaaagttgttgtagctcttgaacataacgttcatcaccaccagtacgtgcagctttaattgcttcttgtgacttagtacgagcagaatctacaattcgagaaatacggtcagacttacctgcattctgatagaacttctgaagtgacttcaaagctttctcgatatcagtacgagaaagagcatctagttcttcacttgcatgttcatcttcaccacgctcaagaataagggcatggccttctcgaatgattttaccaccacctggaagatctttctcaacgtgatcacggttctgactcagacgtgtttcaataacatttctgaactcgttcacaccatcactagtcgcttccatcttagcaagttgttgaccaaggaatacaacgttagactgcattgccatggcagcagatacagctagatcaataacagctacttctgcacttgtatcagtgccaacgaatttaccgccagcatagaagaacttagctttcgatactttaatcttttcgttttcaggaatcgcgttgcgcggtacatcactgatctgagaaagcagcttgtctactttagcttcagattgtttacgctttagatcaaagttcttaatgtattcgatcaacttggcgagaagttcttgaatctttttgtagactgccccaccgatctgcttcattcgtccagtgatagtctcatcatcaatatcgacagattccattgccgaacgaggagtagtatcgaatgcctcaagtcctgttgctttgaccttgagattaaaagtccgatcaatatgaacaagacctttatgaagtactgcggcagattgcttagatacacgaccagtcttaacgacatcgtgataagcttctagagcagtctgtgctgtatgcaactgatcgatactattcgccacttgaccgatgcgatcatgtgccaacatagtttcttcacacatacccacatcagaaggttccattacttcaacaggcttatcttcttcaacgggatgagctagaggttccccgtcaacgttttctgtcgagggtttctcttcttcctgggtctcgctttcctcaatctcttcgatggggttagctgctgcttcatgggcttctacctgttcatgtacggtgggttcaaccactgactcactctcggcttccgtttcagaagtagcttcttccatagtctcactaggagaggctggattaacgataggttcaggagtagcgttttcttcaactacttcttcaacttgttcagtttcacttacaacctgttccgtggactcattggtaccctcaggagtgattgcaggttcatcactattttctcggacaacttcagattctgctctctgtgtttcgatattaggtttctcaccagtaccatcccacagaggttcatgcgcatcgccaaaatcttcgtggccataaataccttgacgcgtgacccattcacctttaacgaatacccagtcaacaccgttaacgtgataaacagcaccttcttctggattttctggtagatctttggtagtggtcaaggcttttacagaagtatcaactgtatcaactggtacttcgcgagctacgccatcagcaatagcttcgtttgaggaggtggctttaccaccaccaagatgtttgttcagattgtgaatagtcatttcgattctctgacatgtgaatagataacatagcataaaggggaaccgtgtggttccccaatatgtcatcaacccaaacgcttctgttcttcttccgtaggtttgcgaagaggagcctgatacgccttaagttcaaggtcggctaccatagccaaacctgcaattaagcgaatcataccagcgagagtgttgttatagtcaatgatcatccgcatgacattattaaggatcattgttagatcgttaacgacattagatacggatggccgggcttcatctctttcctcagcgccaggttttttacgaccttgactttggcgaagttgtccagcttttactctaatcttttcagcggattgttcaagtttacgaagttgagcagagatcttttggtcatagcctttgcgcgattgtaagcgtttagctaatccaagtagtactcctaaacgctgacgaacagcgtttatattcgacacttcaactttgttatcttgctcatttaatggtttctgttctggtacagtgtaatacttaaaacggaagtcccgaatggagtttaccataaactgccaatctttaagttgctcagtcttagtttcactcggaccagagaaataaagagccttattaccctgagttaactcagaacggaacaaagtagcattgactctaaacctgtcgtcttggtcgacttcaatagcccccttcatccaacgtttcgcattgaatatttcaaaccgaatagtggagtcatctgtccactcttgatcaagggtaagattattgaatgttttgtcgatcgcagtgagataaggcatgaacaccttatcatagaaatcaatggtgttttgtgtttgttccagaacaggtcgaatatccaatggtttaaactcgccattgatattaaacttctttgcctttctcagttcaatctccgatttaaatggtttagttccatttaagttcgaagccatctcataaagcatagtgattcgttctacagtacgatctataccagccatcagtactttagcgtagccatataggtcactattcgctctctttatttctaacttagtacgttcccaaacctgcctgctcgaatcactaatgtcttctgtagagacaacgtcagtgagaccgaatttctcaacagcataagctaacatctcaggactggctgtgtcatagttagactggataaatgtatcgagtcgctctatggtttccatccccatcattaacttatcaagtttttcagcacaagcatcgaactcgttgaattcatcttcaatcgagacggacagatcgacgggtgttaccccgtcgactgcgttaggttgggaatggttaactgagtcaaccatggacccctccttacttattgattttttcaggtacactaccaaacaacatgttcattgtgtacatgagatcatcgaagccacctttcttcttgagccattcctgaagcatgtcgttctcgttcggagaaagattgtagcttaggaaaagttcagcgatatcccgacgatcttcgattagttgaacacccgctggcggttctgctgtaagtagcattggccatgcatggatattcactcgacgtttacctgtggcaataaaccgtacagtatcttgcaggaatgcgtaattgtgatcagcaatcatggcattattatcttgacggataaaccagttatagttacccgagaatttaataagagcgagatcaattacacgtttacggaattcccaatacacagcgcggcgaggaaagttggtatattcaaccataagttcaacaacacgcggatcaccttggcgcatagtgaaacgttgttgagctttagcttgaccgccagaatactcacgattagcatcgaaaggtttgactgcattagtaggcattgtcaactccttattgtacgccagcgcgttcttcgatcttattgatctcgtattcatacgcggagatacgacgctcgtaagcttcgatctgtttttgcagaacagggctggtcggttctttagccagaagtgcacgtagttcttccaaccgaagttgaagaccatagtactcttcttgtgccacgttatatcgctcagcctgcatctctgcaatcagcttaccgatgatcaagaagggattctgacgaggagagaaaccagccatacccagaggatcagttttggtaagtccaagattctgctgtgcaacttggaaagtcgattcgtcaactgtagcattagaagcagcattaagcttttgcttcagtgcttgaggttgaagagtcatcgccggatacagtgcagcgaactgttccatgttggtatcgatccaatcggattcagccgacgtccatgcagcgcgggtagccttcccatgtagggcagcttcttgggcaacaaggaacagcagatatttacgaccaaatcgaatatagaaagccagaccttcgatgaacttgagcatgttagctcgatcgaatgtcaggtttgtattagtgaattggatcgagaatagactacggatttctttacgaataacttcgaagttaccacgaatgttatcgagagaacccagcatcagatcgatagccggctggttaaaagtaataccacgacgaagaacgttttccattcgtttggcgaggttagacttcagcgggataccttggaaagcttcccgaacatcagaaacaatcggggcaagggtatcgtcatattcggtctggagttgatccagaacgttcagcagttgacggcgctccattacaggtgcaagctgctggacatagttaagaatactcattggtcatgtccttggttaaatgttggtttgcatctgtttgctgaacatcttaaagatttcagtgatgtcttgacctttagatttctcagccatcttcacttcatcgatgcggaagctagatgcaatatccacaccacggtgataaatagtaacacgctgccaacgttcatcaacaacgatcaacatgagtagatagctattatcgaagatcttacgacgggtattcggatcttctagtttaccgtaaagagcattggcagttgttttcatcgtggtagacgaaacgacagcaatgttagaagcatctgccatagaaacacggccagtctgaacagacttgctcaggttattacgacgacgatcagtgatctctttgtaaactccggacttatcggaaatcagagctgcaaagtgtgcatcaatcatatcctgtccaagaacgaagtcgcgccagaaacgaatctgtccagttttaaccaggaacagacgatggctccaagtatcacggccgccggcactaaagatatgagtaagagtctgcgacggaactgctgccggaatgagacggatgagtacaggcagtttagccttagcatcaccatcggtaatttcaacgttcagtagtttacccacagcgaggttttcggtttcgtatactttctgagtatcacccgaagacatccgtggtgcagcttctttcttttccctatcacccttcttacgatcatcgtcttttgattgctcatacgcttcttgagagtattcagcaatcagttcaggacggatcttttggttgaacgcttcgagggacgggaaaccgttcatgtaattttctttcgagaagacagcgccactaacatcagcaccaatagaacggtacgggttcaggctatcgaatactttgagagtatcgattttacctacaccaagaaccatattaacagcttgcagataatatccggcgaattggctaagtgccattttaaggatatcttgcatgtaaggttggtcgaccagaacgctatcaataatagcaagtggttcaactcgacatgggcgagtcaaatctgcaagggagttaatctccatgctatttttggtcgcattaaggactgtggtcataagacctttaaaagcttggctaccggcagcagcgcctgctgcgccagccatagcactagctacgattggtagtggcatcgttctcttccttcatttgttcacagagatttgaaaaatggcattaagtgattatctaacgcaaattacacaaaacattgggatgtcgccgcgtgatcgttccattgaagattcattcaaaggcctgaacatcacaggtcgtaacaatgcgatttcgttaaatacagaaaaccatggttatactttctttacccgtccattactgaacctggctgaagataactgcatggtggacaggcgactgtccatgatcctgaatcctaacccacagagtatcgagcgtatggttagggcatatttggatccgagagcacatagtgcaggtggcacagcatggtgcggtggagtagatcctcttaacccgtttatcccccttcttagtaacaacttgattagtcttactggttgggaagattttactattaatctcggtaccacaacacccggtgtttaccgtgacgtaatgtcctatgtggacgacgtgccatatcagtacaacacctacgatttacaggcgacattccgcaatattgctggagatcctataacatggatgttcaagatctggctagtctatatgggacttaatagagaaggtcgtatcctaccctatcccgatttattgatgcttaatgaatacgatgccaacacgcgtatctatcgcctggtaatggactccactaaaacatttgtaacccgtattgctgcatgtggtgctgctttaccaatgaatgctccaactggtcaaattattaactttactggtgatggagcagagacaccgttccaaactgcaagtgatcaactcaactttagtttccgttgcatgggaatgacaatttacgatcatatcttgatctatgagtttaatgatcttgttgaaacatttaacccgctgatgcgagataacaaccgtgggcgtttgacacaaaagttacgacagcatgaaaagaaatggtttaacttccaggcctacccgtacattaatagtgcgaatatggaattagaatggcacgtacctaagtctatctacgaccaaatggccggcggtaacctaacacgcggatacaatccaagttgaggaaattttaatgagtcagtttaaagaacggatgtatagtgctcgacgtaatccagcgttgatgcaaaccatcgctcttaatgaactggatacacaaatgaacggctctagtaatggagccgtcattgctgatattccagatgcatctatcccttttgtattctcgcttgagatcggttccatggaaaccgcgatggcaattggtgaaatggaggcattgggacgtcagctgtatccacgtctttcgctgggtagtgaagagctctataaacacatgtcagatgatgactatattggacgctttgcttctcctgctagaacaaccttcaatttcttgattgcctacgatgaagttattgctaaagcagtggccgtcggagatacaggtatcaagaaactagttataccgcgcttaacggaatttgatgcagctggtattaaattcacgatgcagtacccaattgaaattcgggttatgcgtcacggtggtattactatcgaatatgtcctcgataaaaagtcacctgtggaaaccctatcgacgaacattgtaccatggtctatgctcatcattgatcgacgtaaggttatttctcttagcatcccggtctatcagttcgcagtaaagacacataccgaatctcttaacccatctagtcttttccaagagtcgtatacattcaccgatcagttcttctatgcgcgggcgtacatcagccgtactgaagatgataattgggtggaacttaaaacgactcactcggctttggtctatgacccaatggaactgaccgttgtgtttaaagttattggtaataaactccaagtgagtattccaactatctatacaaacacacgaatggcgcagggtgatatccgtatcgatatctatactacccaaggaaagatggatcgcgacctgggtgcttataaagcaaaccagtttaagttctatctgaactctattgatgacgatagctcgtatgtgtctccgttgacaacgtttaacctcattcaatctctggcccgtggtcgagtagaaggaggtgcgaattcggttgattttaacgtactccgtaatcaggttattaataatacactcggtgcaaaccaagtacctattactaacgttcaaattactgacgctgttaatcggcgtggttatacactcgtatccaatatcgataacattacgaatagacagttcctcgcttcaaggcgtctaggagctccgaggtcgcttgatgttatttctggtgctggtgtagccatgtcgcaacttaaagtcgatatggagtctttggcgggctctatacatgtagcggacaatggtgatcgattaacgatcaaacctagtatgctctacacgttcaataatggtcgtgttaacaccgttgctgatgctgagattgctcgtctaaaaggcagcaccgccgaacagattgcacgtgaggtgaacaatggccgttacgtgtattctccgttccataacgtactagatgcgtcgcgtgagaattttgaggttcgtccctactatttagacaatccaacaatcaccgaaaagatttttgttggtgagaacgacacagccaatttacaagctgctatcgatgtctttgatatagttaaaacggatgaaggttatcgaattacagttcgtttagaatctggcgagcagttcaagaaactagctgatgaacaagttgtacttcaaattggctatcagccagctggtgaagtacgctgggcttctgttaatggtaagttcattggtatcgaagacggtgagcgcgtatttacttttgatatcaaaactaaccatgacatcaattccaagaacgagctctacacgactaacatgtcgatgttctccgaggtgcaaaacaatttcgcgagtactctaaataacatgtttgatatcactatccttgttgttaatacgagtacacctggttatcaacctaaccagatcgatgaaatggttcaagcccacctattgccacaacaattcatggttgtcaaccgtgaacgtctagttacaacacttggttatgacatgaccaaaatgtggcgacgtagtcgtactgtacttggtgatgagtcttatcagcactgggaacatgatgtaatgtggttctatgaggaaaacgaatataaacgcgatgaagcaggtaacatcattgtaacgattaaacctgatggtactctcgattatgagatacttcatcgtaaaggtgatccggtattggatgcacaaggtaatcaggttcgcaagcaccagaaaggcgatgtaatgttagactcaaacggtaaacctattttggttgcaccgcgtaagcgtctacgtgaaattactttaatgatggttgatggactattctactttgccaatgaaaaatcggcacttgactacaaagtcgaaattccgatggaattcgttacatggcttgagaatgacatcagtatcctcgatgcacagttacttgaaatgtgtgagatgtatctctatccgactaccacttatggtgatactactgttaccgtacgtgaaggtcagaaagctaccatctccgtcgatcaagcattcactcttagtttctatctgaaaccagctgaatataccaatactacaattcgacctagccttatggctaacggtaagtctgtacttaatgaatacatcagtcgtaagactgtatcgatgtctgatacagttgctcaacttgaagcgacgtctggtgacggggtacaggcacttgaggtattcggtttgggtggcactaataactacgccattcttacagttgaagatgatgctgttcgcctcgcgattcgtaagaagcttgttgttcttgctaaccaagagttaactgtagaagacgacgttcaattcaacttccttaaacacgaagtactgaataactaaacgacatattgcccggctcaatgccgggcaatatgttgtcaaataccaagctcacgtttgatatcttcaaaacgcttaatcagtttatcccaggcggcattagctacgtcacttgcgacatgagcatagaaatcctcacgaacgatgtcgtgcgccttgatgaagaagttggcatatgttgcaccagctttgtactgataaagaggaatacggctgaataccttaaccatgtcattcagtgcttcaataccagcgttaacgttggcaataacagcctgaagtttaggaagtggtacaacagattcttctagatcaaatcgattcactttacgcagttcgtctgcacatttaccatagagctcatagatgaacttatatgtaattggctcacgctttaacatgcgtttagtatcttcaaagaaacgaataccaactcgtttgtgtttgatatagaagttaggatcgtcagactgactatccatgttcttcagcgtttctgccagagactgtagtcgtggtccaatatgagattcaaagccaagttctaaacgagagcggtccattacttgacgaagctgtcgaatttgctccagcagttgtgcaccaaatttttgtgcttcttgttggatatttcggattcgacgaagatcatcatctacaccaaaagccaacaggccgatatcggagcggggtagcttaggatcaagtagaaccacttcggcagcttcgtaatacttacgatcaagattacgattacccaaacggttcaaagcttgcatctctttccagttggattctaatttaacgattttttcgttaatagaaacgatcctaccttggatcacttcgtcattcatctcaactgacttaacccaacggattgtctttacaataaagtcaaccagtacatggaaccattctttaatggtagccataatagccgaaccaatagcttcattagaaacctttagattcaagctagtacgtgtgggcgtgaatagagcgttatagttttccagagatggtagtactggcacattcaaaccaatagcttccatggaactatggataccacgaagagctgtgatatcatgcgaactaacaccttcggcacggatagtagaacgtagatcgtctagcgtgctaatatgctccaatgcagcatgtagcttttcttgcagatttggatcgagctgaactccacggacgggagctgcttcaagctcttcacctaactgtcgttgtccttcaataagaacgtcatcgtgttcatgcattttcattacctttagaatgctcgtaaagcttgtcacgtaagaggtacaattctaaacgaataatttcttcaattgcttttcgcctggctactacaactccacgcttagaatcaaatgctgctttattcgctacaattgcatcggtgacaatccgatggccattacgtaatttagtaatgcagactgtcaccaacatttcagggtcagagatgatcttctcttttacgattaatgactttgcgtatgcttttgtaatacgcgggtgaactaagtcatcatgggtatggtcgatcatgacgacccctccctgaattagccttctacttcaagctgacgcagaacactggctatagcattttgactcttagcgaaatcaaaacgactggcaagcatgttagcggtagcggtttcatcgattgtctgataatcttctgctgtaacggatttcattgcagcttcaatgatagctgggtcgctaacacagttaatcagttccaatcggatacggatgacttgtttaaagagttcacgagtcagattcaggtcgagagcaatattctcgttaacctgaccagctaccttcttcaacataggcatgtgtgcatcaatcaactcttcacaagaaagagatggatcaagctggacaaagaaaccaacagcgttagctacaaacatggcgcgagcttgacgatcattgttggtcggggatttaatttctttcaggatacgggcaatttcaaaaccagtacgcatttcggtctaccttgtttattgagttaagcggaaagcttgtaagaacaaatcattgttcagcaatgtctcaagattctcttcagtttgtttatactgagtttctttacgacgagctggacggaagaattctaggacggtatcgaacaaattacggttattagaaaagtctcgaataatgtcatcgatagctttaacatcatcactcatcgaagctttatctttaactgtatcagttctacgtagttgagcaataagatctcgacggactttcatgattcgttcacgtgggtcatcgtaacgtgcagagaaattgaattcatctacttcgctatttgtaagaataaccaacatgactaatggtgagaaccaaagcatggccaaggcatggataatcaacatgatgtacccagactcttggtactccattccgtagtatttatcgaacttatggaggcatgtcgctagatcacgaccataacccaaacgagaggcaaacatatctgccatctgctcttcacgtcgcattgctgtaacagggttattcatcaaatggtgtcgtggtgcctttttataagcagatagaatagcacggcgaacgttaccgatatcagagcggtcattaatgtaggcctggtattcttcttctttaaggttttccttcaaccatttatcggtgagaacctcaagcttgaatacgttgtttttcttaccttgtagaatttcaattccatctgtaagataatagttaagccatacgtagtcgcccatgtacataaagacgttaaaggtgtgtcctatttcgtgaacaagagcagcagttacttcacgaatggtgaaacctagtttctcactaatgaacccaagagagatatacatcttaaacttcagttcatcggcgagaccacctttaacacgaacgttcttaacatcgataatggtttcaagtttccgcggatcgttatagctgttctctgctcgaagccacttatgtgcattataccaagtaccgctatgacccaacgccatcatttctaggctaacgccggcgtctaatccggagtcaccactgacagtaaactcgtaattaataccggtttcaacttttaattcttttgcaaaatcagtaaacaaactaacgggaatgatcttgtcctttttatacgcttctctgataagagtaacgtatttttcagtgatcggtccaatgttggatttagctccaactactaacatctcttgagagatagtgtatcggttatacatgagagtggcctactcgtcagttttattaatcataaagtaaagctcgaatgagagattactctggtgattaatactacgtgatttaagttttaaaaaggaagctcaaaaatgagtgataatatttctttcagtaaagaagatgtaatcggtgtcgaggctaaacatattacatacgtcaccgataggaatcaccgtaagcatgacttacatgttgttaaagaagtcgtgcatcttaaagataaacgcaggattccacgactgaggtttattgaggattatgaacggccatggtggctggatcctgaagtaaataaaaaagaaagccagcgtacttatcatgagaagaaagactatgagtatgctagtaagcttattaaacgtaagtctacccagattaacatgccgcatgcgattgctaaagctctgggtgattacagcatgggacctaaccctaggcttcgccaactgagtcgaagtccttacctgtatggtgcggacgttagttctgtatgctgcttgaagaacgattatcgaactgctgcacctgatctcatttctcgtaacacggtagcaggtggtgatattgagaccaacgtttacgaagatggaaaagacggacagattatctgtatgtccgtaagccataaagaaaacgtttatcttgcctatcttaaacattgggttagtgatcttaaagaccccgtgaaagaaacgttcgaggaactagaacgtattcctgaattggttgcacttcgtaatggccgtaatcttaaaatagaaatcgaagtggttgatcaaccagttcacattgtcattaactgtattaagcggctacacgaatggaaaccagacttcttctctttctggaacatcagcttcgacatgagtcgaatcttgaagaccctggaagatgcaggagttgatccggcacttgtatttagcgatccgtctgttcctaataattacaagtatttccatttccgccaagaccaggcgatgacaactaccgcttctggtgttactaaatctaagggacctgaagatcagtggcattggattacatgtcctgcctctttccaacccattgatgcgatgtctacgtatcgggtaactcgtcttgctaaaggtaaagagccttcgtatgctctcgactatattcttaagaaggagctaaacgttgatgaagaaacagagattcttggtgaagaagatctgattaaattcaagaagagtcttgataaacttctggtagaacgtcctggtagttatccgtatctgtttgttaactatagcggtaaagaggatgattggacaccggtagagcatttcacttggggtgaaactgtacacctaggtaaccatgttcgttacacaatgaactttggtaaacttaagtttgctgaaactgatcaccttggtggtatcgaatggcacattgagatgcagaagaaccacaaggttcgttatggtctttacaacatcattgactccattcgtctggaacaactggatgaaaagatcaacgaccttgctagttcgattactctgttctctaagtcttctgactataagaacttcagctctaacccgaagcgtctctgtgatgacatgcacttctggtatctgaaccgtcctgagccatgcgtaattggcactagctccgaccagatggttcacgagctagatcaatacgttgtaggtcatgatagctggattgttacactgccgtcctatatggctggtccaaatgggttgaagtgtgttaaggacttacctgattacaagactttgatctttagtcacgtagctgaccttgacatcgtttcgacttatccgaacgttagtcagattctcaatatcgctcgggaaacaactgtcatggaattctccatgatgaaagatatctccgaacatcatcgtcgagaagtaggtgtgaacttgacaggtggacgtgttaatgccattgagatctgtcagaaaatcatgaaggctccgaagctggatgagatgctgaagctttatttggataagaaggctaactccccaaagtgatatatcgatggaaacgtcgcggaggatacgaatgttcctccgttggcgataaaaggttctccgccttaaatgctgtaatgcccgatggccgaactattgagatgcactaccaatgcgatgttaaaggttatgatgttggtggtactaattggaagctcggtaaaggcaagcctccgttgagtcctataaactcatgggatgcatatttagctctatgggaaacatgggcaaaggcgaatcctgacctgatgaaagaacttcgtaaaggagctgaagcaaacgaaggatatctttctgatgtctttgcatcgactaatatctcacaagcacgcgctttagcagaactcttgaataaagggtattgacaacatattgccccaccattaggtggggctttatgccgttaagctttaccaatcaactctagaacaggacgccaacccatatgtgcacccgtattggtgggtacgttaatattcaactgggacatgttactataaccgataccggcatatgctgttttaccatcgactaagccagtttcctgaccccagctataactaccggctccttgtccacctaccccgagatcagcgttggttaagttttcccatgcctttgtaccggttacagttccatggacgttatacattagatcacgccattctcttcctggagcagcgttattggttatacctgtatcggtagcgccaatatacatcaatcgacactggtatacgttgtcaccgatagtgattcgtttaccccctaccattcaatccagcacttgccagagaattccatgtcatgttgtttttgagtggtttttgtgggatataaagaatggtgcttctgtgagagaacttaaaccagtccggtgcctcattaagaacagtcccctcgctcaaaccaactaaggtagctaacgcagatgctgtaattaattcactagatgggacacgaccaaagtaacctatatcgtcattaccggctataagtgattcagtaccaggtcctttcgatggaataatgtccgggtcaatccaaattagaattggacgccatccgtagttattcatatttgaaccagctacttctctacccacatagctgattgaattaaaaccacgatagaagcctttacctacgtcagtaccagtagtttggacttcacgtacccaattagccccaccggtactagctaaaccaaagtcacttgttgagaatgactcaaatgccgctgcaccagattgtctgggtattaccatcgaataaaccaaacggttatattcgccgccaccagttgcactggcaccagggttatcaatacccgtcataacacgacataggaacttatgtctaccgatctttatttccttaccatcgatgagtccatggttctctataatcgatctagcagcgcctcgtctaaaaggtgttttcggtaaataaataagtctgttattctctttgtatttaaaccaagttgtttcactagtgtgtaatgtaccctctgtgaaaccaactagattagagaatgcttcaggttgtggtaggcctgctttaaacccaccgaaataactaaagtaatcactaccagcaattggaatttgtgatcctggtggaaatgtatcatcgtacttattaagaactgctaataatgattcgaacatatgtaatcctgttctttcttaaaacctataccattgccggcataaagccctccctgaagggagggcgttatgtttactgtacttgttggaagtactgaagcaggagaggttgacgcttagtcgggaagagggataccagactaggaacatcgtactgggtccgcgcttctttgttctcatcggcgaagatgaagaacagagtcaggatctgaatgtgcgattcttgtacaccaccttgaacactcaaaccatcagtgaaacggaatgcatggctatcatcgaacaggccaggagacttacggttttcggtgatgaatttccgaataatttccataccgttcttaaagccaactggatcttcgagattgataacataacgaataacgttatccagttgtttctgcgccatgacaccagtttgcggagtcagtggtttacccggagcacaaatttctttgtatttcttgagagtttcttcaatgtaagtttggttcacttcggtaagtccttcgtaggagagttggatacgaacagcttcgacatctactttcggagcagccgcagtcggaatagttccggtcaaatgggtagtctgagttgtctgtccggtttgagctttataagccaggatgacatcttcaggagcattgctcttactaaccaacatcaaacgttctttcagttcaacggccagtgcgggttcactggtagaaccctctgggcgaatctcaccaagagcccagctttcaagttcttgtgtggtccattgagttgctttacgtgcaaaacgagtgatgtcggatttccaagcacctttagaagttttgtcaggaacaataccactgacaaggaactctttacattgctgtggattccaggctagatcaagagtagcttcacggcgttgatgttcaacaatagcttccttcagaacattgtaacgaacatcttcaacaagctcgcctttgatatacagttcgagttcttctttagtccaacccgatacaggagtatcaacgagaggcttgacttcctcaactacttcaggttcagaaatagctgcggtagcttcttctcgaagcagatcgaccagagcgggggtaggttctggatcagccagctcttcttcggtttcaccttccggaggaagatcagtagtctcttcgagatcactttcttcttctcctttagggtcaccactgtcttcagcttcagattcaacatcggtatcgaatttatcaacaacttcaccgcaagtcagcatccgaccatcgtcatcatagaacgcatcacgatggagtgcagctagaacaggagctacgagtgctgctacttcgttgtcatcatgaccttcgaaagcagcttgtagttcttcaaaagaaaggggaccgtattcaaccggtgactcttggggagtttccggaataacaggagtaacaggttctaccggtttagctacggtaggaatagagaaaccacgatttcgatttttagccatggggatttcctagtttgtgaatagtcaaagaattaggggaattggtaagattcccctttgtcttaagaaagacgacggaccgggtcccatttaacagtcttcagagtagcactgtgcatcttcgacatgaagatactcaagaagcgtccacccacaccagctgccgcagcaggaataccgttggggttctcagcaagagctttacccgcacaagtagcacagatattcttatctcgtccaaggatacccttttcaatgtcacgtccagacttacacgtcattggaccacgtacatcgataatttgacccataagtccatcaatgttttcagaggtaataagaatggattctccatccttaaccatagtgtaaccaacgagttctttagcattaaacttatctactcgcgttggaacaccaatatgtgttttacagtcaggttctataattcggactgtaccgaccattcgataaatagtcttggtggactcgccacccaatgcagtctgagcaccacggttataagaaccataacgaagagagttgttcatcacaggcatgtgatctgtatcaatgccttcttcaagtgacttagagataagttcaaccgacgtaccatccgagaacggagattcaccaccaaatagatagtgaactttcttacgaacaccaccgaatagcttagcatgttttgcatcatagaactcatacgactcatcgtcagatagatactcttcatccatcttaataagttcgttacctatttttgcaacaatagctgggtcagttaattgatctttatattgttccaaaagagctgcacgtactttatctctgtctgggtgagcagtcatcgatttacgtgtaacagaagtaacaaggctatctgcgtaagcgggaatagctagacaatgatccgcaaacattagatattgccaaacgtagatcttaccatccggtgctcgttcagtgacgttaccatcttcacggtcgtcaatcagtctatctagcagctcattctcaattttagcaggtgagaaatatcctgtctgaaatgggaagatatccccgaacggaaggactagacagaggtagttaacgaatacattgccatacgtagtacgtaacggttcagtacctttgtagttttctatttcacccggttgtaaaatgaattcatcacggaagtgtaaaggagctcgaccttcgatgtaatcatcgatgaaaattttctcatcgccattcggcatgtagaaccacattcggccttcaccaaaatgtggcttataaggcatgttaggaatatcatcgttattataaacgatgttgaacagactgttcatccaagcacgttttttacatagaccagctttaattcctaaaaggaaataatcacgcagtttcatagagctttcccattttacgcttgatctcgtcgatcacccgttccatgatattacgttccatctcgttctctgtgtattcatcgatagaaactttaacagtgctatagatactatcgaggtgaagattagagaagaatgcaagacctaccatttcataagccgcatcttgagcgttcttattgtccaggctttcaagactattagaaaggagttctaaccagtcatgtccgactcgcataccagaattagacagttcgagaaccatactaaacttatctcgacctatggtattcatcaatcgattaagaacacggatacgggatacaggagcgatgtattcgtcgatgtgaccacgcgtcatcatagtgtcttgcaccatcgcttttaaagcatcgatgaaagaaacagatacttcattaattaaaggccacacttcgtcgaaagaaaggcgttcaaacataggtaccagatgagcaagaatttcctcattatcgaaatcgccttgtagaatcaactcaatctggtcaggaagaatataatttggcaaacctaaaatagtacggacaattgcaagccgttgctcttgtgtcgcctcatccgatactttaacttcgtgtgcagctagaacctgatcatgggccacacggataatatcgtcgatacggccaagcaacatcatagtgtctgcattgtcatcagcaatagagcaaacggtatgcagttcatcaagagctgccgagtaatccatttcctctagggaagctacgcattcaagcatgatttcttttcgttcttccatcactaggggagtgaggatactatctagcatttctttcattggaattatcctgtataaatgaatatctaacatacggttatgttgcaggtatgtcttcgtaatatgtgaaaagttacgtttcctgtaacatctatgttactacactattccattaggagcttcaatgagtaagtttagtgagctgccgtttaatttgatggatacaatacaccatccaaaaccaactcctgaagatgaaaaacggctctctgaagcccttgataaaatattcccccataatccaaaattggagcacaatcaaatgaccgcactgtccccgaaagaacaactggaccaagctgtagaagcttctgctgtagcagcacaacaactcattaaagaagatggctgggccattcttcgcgaattgtatcgcactacagctgctgctcttaatgctacttccattgttatcattccggcgctggagcgtcgtgaagaaattctgagtaaactcagtgatcctgaaggtttctctaaagatctgcaaaactgcatgtctgatattgaacagatgatcagtgctctggaagctcttagtattcttcacgtaaacaaaactggtacacctgatctggctgatctcgatcaaatcggtaagctgactttgggttacgcaaatctccaacataaagtagaaacagctgttcaaccactgctgatgggtctcattgctaagatgcaagaagctggtgttgatactgtttccttcgtgaaataaggtaatacaaaatgcaagagcttgatatggataaagaagacaattatcctgctgagggtaattgggaacagcaagctgatgcagaagtagaacaggggcccacgggtcccactctaccggacgcacctgcggaagaagtatcttcttcgcctgctgttgaactacctcctctggtaattgaccagaaaccagttaacttcactgagacacgttcttgttctagtgaagctattcctggtatgacctctttgatgagtttcattctagaaaaccccaagacctttaaccaggtattggaacgtcactcggcgctattgaatggaatgcaccaaggtgatctcactactactagcagtgaccgagattggttgatttctctagtagctggtatgaaccatactaaccttgaccccactcctatcggtgggacggaacgtgaaggttctgtatggcaacaaggtattactggtcatgataacggtaaccttattcgaccaggtcgcccttctcaaaagatcgatcgtaataaacgacacagtaaagaagaactgttggcatacctctccaagaaatctggtcttggtgcgacatacgaaacgtttatgcctcgttcgggtatctggcttcgcctgcgtgctccgacacttactgaagtagtcgcattgcaaacagaaatgcagcagatcaagctgcggctgggaatgcaaaccaaaggcatgtcgttctctaacgctggttccgtaatgatgaacgcgatgactgacctggctctgtcttgtgttattgcatcgaacaagtccttcattactccaagtgacctggaacatgaactatcgatctttgatgaagctatcctgcatcatgccctagcttctacaatgtacattgatggattcaactacgacgttccatgtattgcagacccggacaactgtacggctcgtatcactgcaaaacttaacatgtcgtctatcgtttggtttgacaacactgtattcagtaatgatcagcgtaaatttatcgctaagaaatttgcacctgctacggatgaagacttcaaagcttaccgtgaaggtttcggtattggcggtaagaaagtattctggtttggtgatattggtgttcgtcttgctatcccgactatcgctcaacgtaagatggctgcttctcagtggtctcagacattgatcgaaatgtctcaaggtacatttaacgaaccgccacatggtgttcaacgttcagcgtacattgataaactgagtaaagctactatcgccatgcagtatgctcattgggtagatggtatctatgaaaaggacgacgatgtagaagacttcgaagatcaactgctttccgacgatcaagaaatcattagtgattatctggcgaacactctgagtgatccgcagtacgcggagcagttctttgataccgtacatgagtatactaactcttgtgtactggctgtggtagctcttccatcgcataactgcaaagaatgtaaaggtcctcagggccaagcattcaacgaacgtttcccgcaccttgtaccgctagacatgatggcaatatttttcacgttggcgggccagaaagccaagcacctggagtaatcaacgaggacccccggcatagtcgtctaacaattaatttggaggacgacaacgggcacgttacaatgaactctttcggtcgcaagactgttaatggtaagagtgcattcgatgaactcgtgcgaacgctagatgccgtaaggccagctattgccgaaatgttgaccaggaaggcctaccataaagactacggtattttcgatcatgattcaccagaggctgatcctttagatctggttagaatgcatcctaaggaaaacgtcgtagaaggtggacctgaaagaacttggatacggaagtttgtcaattacaagatcaatgacatttatggtttatctttactagagttctttgaactaccctttaatgattgtttgttcatgattgaacttgcagagtcgaaggctattcaaagtacatcgcaagctagacaaatcgagaaagatcttggattaaaataaaaaaaaataaagcatagctcctacccgaaggtaggagctttatgccgtcttacacttgtgcttcaatcatcatgaaaagaccacccaagaagagagtgatcagcgctacgatagcagctccccatatgagagcagtgcaaatcatattaatgcggtcaagcatgatgatatctttctttggtaaacgagttcgacgaacatcatcattatcttttaccagttttgctacgaacagggacccagcgataatcgaaatagagatccaccagatcagcatgatggtttccatgattaactccttgttagttcatgagcgtccacggcggtaactggagaggggtatacacgctaaccagggccgtaatgatcattactagataaatcgcaaagctaattgcccaactgacgcagaggaacatgcagaggtacttccaattaggaagccacttgcatacacccattacgaacagccacgatacagcatagccagtcatgaacagtagtccaggaaagctaagtgtcccgtaaataaacgctattgggttagtaaacatcaaatccatgttaactcctattttggaagcatgtcgaataaatgatatccactatagccggtgatagcaataataactacaccaaatagaaccatagagattctatctgaaaaggttttactgctagctaccaagccatagaaagtcattacacctccaaccgtaagagaagcgaagaaggtgagtatcagtacaatccatcccatggtatcaactcagaaagatgttataaaaggttgccatgatcaagtatacggcaagaaggattgctgccaaaggaccagatgcattgaaagctttagccagtttaatcggcagatggttcgttttgacacccatgaccgcaagtccctgtttcaggaaaaagacgatgaacagagtgatgatagcgaaagcaaatacattggtgataatagccattacattgtcctttatgtgggtgtatattcacagttgtaatataggctttaaatgaacttaaatgcatatttgagattagctgctgcgaacatagcaacagtgaagaacccaaatccagcgattagataataacgatactctctccagtgtttaggtgtatcgtaggcatttggatcaactagtgcattaccgatacctaaaacacaggtacatgcagctagtacacctgttgaaatagccagtgcagcataaggtagatagatgtatgccacaacgggaattgctataacaattaccagaaggaggaacattaggttggggaaagggagagcagcgggagatgtattcatttgtaattccttagacgtgggatgcagcgattacgaacatggtcagcgtaaagtaagctaataccaagtaacatttctttacgaacgtatggatcaatcgggtcaatgcaatctcagaatactctatagactgctttattaacttcggtttgatgttctgtccggctaaacgtaacaagtgtttatagtgcgccgttctgtactcctcacggagcttcagttccaatacatacatcacgacggttaatatcggtgaaacaataagtaggatcacaggtgacatttctattcctcttaacggtataaagcccacccgaaggtgggctgttattagtgcatagctatccgtctgagtaccattgaaagagttttaccggcgaaatgctcacttttattccgagcatatctcacgtggtgcggtatgttttcacacactaggtaggtcaacctaggtaccacatcttggaagtctttcagtttacggagacgacccagaatttgaatgttatctttcttggaatcggtagcttgtaacaatactacctcacgaagattagggatgtctacacctgtaccagatgacttaatagtggacaccgtaatgtcgttcttaagtaactgttcataactgcaacctgagacatgtccgttaaccacaaggtcagggaacttagtcttcagatatttaaccagtttttcaataaaggcgaccgttgcacaaaggaggagtagtttctgaccaggtaaccgatctttcacatacacgccctcagcaatacgaccgaccatcctgaaatagtcatccatccgtttaggatctttcatcattaccgtttcgtaacgcgcatggttatacgtattcttaaacggtgtaagataatccttcggtttgatctttggttcagtgtagagtagccccatgcagttgatgtagacatcgtagttgggcaggcgacacatggtctctgctggcaacatcttgtcaatcatcttcgtcacgtaggcgttccctgtgtagggagtagccgacaaatagatctgcttattaatgttagagtaaatatcgatacggaaggttagtcctggatcttcttgaatctcgtcgttaatttgcagtcctgcttgtattgcttcgtggaaccggggtggaggtacattgtatccgagctcatggagtcggttaccatacttctcaaagttatctagatatgcccggtaggtagtagaagagattacaataacgtcaatcccttcaagatcgttttcgacgccgcgatctattagtttttggagttctgcggaacccgagatggtaatgtatctctgggcaatgtccttgtaagtgttctgaagagcctcaatccaaataccaaaatacttgggaggaaccatcacaacacatcttacccccatcgaagccaaggacgctaggctcgtgagggttttccctttcccgtttgcaagtctacccgtgcagaatgtaaccaatcacgcaaaatatcttcacggatgatttcctgataatcccggagtacgtatttctcgtacatttcgtaaacagcagttgctgctttagggacagggatatcctcaatctcgactcgttctcttgggatacctttgttctccagataaccgatcaggtcttctagtgaatttcggtggatataagtctctgatagatcttcgaaacaaccatagtactttttcttgagttccatgatgattcgattaccagggatcttcttaggttctttcaaagaaagcccttcaagaaacccctgcatcttagcgaacgtttcccgagtatacccagatagtcggacaccatgcgtatagcgctcagccttgagtatcggtagcataaaaaattaacgaggggaaagggagagccaaagccctccctacctcgacctccatcttaaagcagcttacctcccatgaccgcaagatcgtagggatggtcattcctcagtgtgtagaggaaactgccaggattgttcaacggctcatgttgcttctcaaacgacatcgcaccagcaagagaacgggacatcatcagtttgttgtatttttcaaactgacccgtaatacccggcttaggcagacgataatcgcgttcagcgatagagcgcaccatcatagcataaaccagaacctcacagtgaacggcattcaaagagaacttctcattcaacagcgacacagtggctgccaaagcatcaactgggtctttgtagttcttaagataagtcttgctagtaaaacctaccttatctgagctcagtttagacccttcagtatcactaccagagtgcaggaatgactgaatacgcttcatcacttcgtacatgtttacgtgcttattaggcaacgtcaggaacggcagggcaaagtcaaacccggccatatcgatcacgatattatcacgagcgtcaagttcccaacgtacacgtttgatatgttgcagcatttcagtcgatagactagctcgacggttatacagcgacaccgtcaatacatcgccttcgtctactccatcaaccgtccgtaccaaaccaatacgggtcagttcagaagcactcggtgctggatatgcactaaggtcatcgatcatcagaatatcagccaggttctgggcttcgttacgaccgatcatcaagcggaaacctttacccgagagttctttcttcagataaagagtttcagccgcagatccagttcgcaggtacttagcttcgacgccaccaatctgatactgttctacagccgaggttgcatcagtgtgttttgtcgacaataccgcagaagtgattttgtcacccatggatacagccgatacctgaccaatgacagttccttttggaatagagaaacttagtcgcccataacaccgcgaacatacaccctgaggatccggatgcacacatcccaaaatagaacgcatcttaatctttttaccgataagatgtttctcatcccctttcagccagtccagttgacctgtctgttcgttcagatagtacttgccacgaagagctttcaacgtaccctgcattacagggaagtcgatcaagtgaccattacaatcaccagtgtgtaggttctgtacatactgagcaatcaactgagacttccggttgaaatactcggttacacgcagtagctctttgttatacaacagagctttggtacccgatcgggattcgatcatgttttcatacaaaccccatataccatcaatgtaaccagtggtacacggctcactgaaaatatcagagttaatgtctgtcgggaaaccacgtggtccgtatgcctgaagcaattgctccattttctgcgtacccgagcgcaggccctcaatgatgctgttaccacggaactgtgtttcgtcgttgaatgcttctttgatcatcccgtaagaaatgttttcaatcccgtacgtagtaggctgtacatcttggttagcctttctaactgccgggtgattgtacacttccataatgtcaaagatcgacagggttgcaatgtaagcactcagtcgagtagtggtttcattataaagccaattctttccttcaatagccagtttagccaaaacctctggatcgatctgttcaccactccatgcatgaataccccaaataactttgttcaggtatttcacaagagatttagaggtaacccgagtagatgccagatggtaatctttcagaaccggggcatcagggaaagctttcagtggataccagagcagaaccgacagcttggtgatccgatcttttgcatagagtttctccccgtcatcaaagatgatctcatgccattcacttggaatcgcccagagttcatcgtaactcatattgagaagatcacgtgctttatactgattcattatttacctcttggcgtgcagcccggttaaacaccgggcgcgtacttgaactgcaatccacggcattccaacaagtgcgacagaagtccaactggtcgggagttaccgaatgggattttggaacgatcaactgctttctcaatgttggacggtttatccgcagtgaggatagagttgatcacagcaatgtgtgcttcggggttattggtttgatccaacagttctaccgtgggtagtgcaccgaccgtacagttgtaagatcgagtctcagattcaccaaacgaacgaatagcgctttctcgaccaggtgtactggaccgatcggagttattcagtttcgatggtagaccaaactgttgagtcttcaccgatgctacggccgaccagtcttcaccgatcttttcgagcagcatcatgtatagcgggccaagcaacattgggtcttttgtcgttacttctttacctgtttgatctcgatatgtcaccggtgcatatgttggacagaagcgagaattaaggatttggttacttgctgtcggcaaatgtacggggtcatcaaccggggaatacaagtacgcaaaaccatctctcaatacatgcgatacatgttgaatcggattcgggtgatccttaaccattccatgcattgtcggagtaacgattgcatagaaatcaagcagctcattaaaggcatacttgataaagtcaggattgtttctgatatggtttacaacgtcgtcaagttcataggaaccatgacgctctagcccacattcaactctgagacgttgagccagatcgcgagatgctgcaccgaaaccatgttcatagatacgaccatagttagaacgacgcatagtcgagccgccaaagataacaacatctgcaacgttaccattcacgtcacgaggcatatctgctcgcttcatgatcttacaaacgacacctttcgtttcgttcacccagggacgttaatcctgagtcgttagtacaaccattgcttaatggctgctaaccgctacatgtcgccatgcagaccagactatatcttcaccttcaacttaatggtcaggtgtcccccatttccactcacttgagtgtactccgcgtaaccggatagtcgttgaacgttccttacatttctgtaaggcttcgctgctgattgtctcagagagatgtcccagcaattagagggagttcaatcaaccttttcagattgatcgggcagttttgagaggaatgtccatccaaataaatcgattggtttatcgactctattctggatagttgacctatctactttgaagtactcggcacacttggttagtgaactgaatgtttgtgtatgcaggccattataacaggctaggatttccatccttacactcttgttcgtattcctaacttcgcgatactgatcttcgttgtaactatccctaacgatgaacacgtattcgggatatagtcgcctcgcatattcaactaaatctggtatcgatctagttggacattgatacaactgataagtctttaacagaaccttggtcgagtatatctcttcagacacaccttctggttttagtacagtcaccatgtatctagatggtggtactttttcaaatcgttcagaatagaaccatggtgtagtttcaccacgatatcttaattcaaaacgatcattaaccaatgacccgaatttctttggcctcagcattgcatatggagcatctttcgatagtcccataaactctgcggcttgagccaatgatgggaagtcatgaataactctagtttcgaaatctctaacgaaacacgatatgttatcattacgtaacccatttgcaacagcatggtagttattaccagagtgatcagtccattctaagttgtcatcacgattgttggttggattaccgtcaatgtgattaactagatagaaccgttcaggatctgggttttctacccatgctagtgcaactgctctatgaacgggaagtgtttcagttagcgaatctcggaatgcgttaacgatgtaataaccattaagcttatacgaggaaagtatcttatcccgtataaccgatttcacctgacccattctagttacagcgtaaaattcataaccaggaattattctgtattcttcattcatgtcatctcctattaatggaggatgaacattcctaaactaccaccatggaaatcagtggctttatatgcaccgcccggttctttaatcgattcataggtgatttcaacacgccattcatcaagttgatccagtcgatacatacgggtcagcttacgttgaccttcggcttgaggcagatagatcatcgcttctactacaagttgacgaaactcctcggtcatatggaggcgatctttacggcgggcagacagacctttatataccttgatgatctcacggtaatacgacgccagtgcgtcatagtacttccgcagttgtccatccataccactcggagtataagatggattttgacgatcatcccaatacactttgatgtctttaatgattgcgcccggatcaccaattacggcacggtcgaacgtacgatcgagagtgcgcaatgcacgtggagtcatttcagctggcgagagatcgtcatcaaggtctcgaacagcgaagataacaccatcatcacgaatacgttcaccgatatcagggaagagcttgatgtttttatcgtcaccgtacatattgaggaagaatgctttcttaccagctccgccagtagcggttgtataagtacgaggagccatcttctcccgaaggaactcatcgcagaatacgaaaccgtcctcaatagtaccaggcatagaaccgaacatcacggtggcgttaacgcccatgcccagaagaccattttcttttacagttgtggattgtgcaataaccgtatctttggcaaacatctcaccaacggcaaggttattccatacatctttctgcttctcaagtttgaatccaaagtcctggtgaaagcttaggtactctggtacatggataacaccgattcgtttaaactcgtcgtaatactcctcatacacgatcgtagttacggggttatgtcgaatagatccacgacccacaccagtgggatacttacggataatattcagaacaacgcaatccgttgggaaacgaatatcgaaggtatgttcagcataacgcatttcgatacccgccattacccgacgtggctcgttcccttccactactggcgattgtccaatatgtgacagcaacatggcaccgcgtgccgcggaggttgttccgtaatatggatcaattgccgcgtgaccgagcaaacgcaggttaatttcacggatggcatttggtagactttgcatctataactcctgttgatcgttggtgcagaatgattatatagatgtgaaaattatttttttgtaggattcctctatggcatttacaattatggaacaaaccggtgacggtggagcatcaatgttttatgatccagctttccgtttaattgtcgaaacacatatcaacattctccgtaatatcaactcggttagagtagagattccgaatgagttgtactggcaatacgaaggaaacttttatgggtatttaacagagatcggtattgagcctgaactccattggatttatttgcgtgttaatggcatggaaaatccaaaccagtttgcagcagatgtccgtaaccctttagacaaagtgtacaacaatatcttgatcaagccatctaacaacgagatcggtgcattacaacagttctacactagtcgaaaattttaaagcaatagcaggggaccctaagggtcccctgctttatgccatcttacaccaatccaagaccattggtttgacgcatgccagccacagcctgcatgtacgggttagccggttgaccgttacccatcatcatcatgccctgttgttggccacccatccacgcgggaatgggcgcgttcgcttggataccctggggctgcatgttacccatttgcataggttgcatcatcccacccatgccattcatctgcatcatgccattgcctggcatcatcatgccgttattcatcggcatcatcattcccatttgctgctgcatcatctgcggttggggattctgtgcagccatgaattcgctcatggagacagtatctttttctacaggtttgctaacaactgcggcgggacgagtcagctgaggagtactggcttgtggagcagtaacgctcggtgtttgttgctgggtttgtacagcttcggcagtttccggagtatcctcatcacgaccaccgaggttgccattcagcggagggataaggttatagatcttcgggaactcgtcgatcagatccagatcaaacacaggaataagattgacggggatttgcagtggaatcgcgtaccggttaatcagctgattgagcatcacgattactttgtgatacgcagtcagaagactggtatagtacggtgcaacacggctggtagtaccaaaagcgtactcttccggattgtcaccaaacggaacgatcagtttgaacagcgcagtaagaaccttacgttgcttcttcgccatcttgatgccaagaacgtcatcggtttcagcctgaagatcttccaggatggggaaacgaatgatcgccatacggtttactttcttaccatcgaacgtaccaccgttcttcaggtatactgcaaccagtcgatttttcttagtagcagcaggcatcagtttctcgaacagaccgacagttgctttatccgcatctgccagtttcttcaggaagtcagttgcatccggcggcaggtccttgtgggacgacttgtccgctgcgatggtcagaagttgttcggccattttgtggacgacgaaactaatgtgtgcttttgctgcgcgttgcagatactgaatcaccggggaagtaccccggcgactcaatgcttcactcagcgggtggaacggctggaagtcttcaccgaatcccttgcgaaggaacttatcggttgggattacaagacgtttaccgtctacggtcgaaggagaagcagtacctaccggattacggaggctgatataaccttcttcatcgaactcgcaggcgaacgaggggagtacagacttatacgagtccaagatcaacgacattgcttgctccttggttaatagcgttaggcatcatgatgggtgcagctaccggatgttggtaaccgacagactgaagagcctgatgttgagtcgtattgggaattacttcttgtaccagccacagcatatcaccagacaggttagtcgggtgttgctcgttacgggtaatcatcggggagaacagactatccgtaaaggtcggtgcaatgaaacgagtcagcgactgaccaccgatggcaatatcgatgatcgagtcaccagccaagtccgaatgcatcgagatacggaacggcagctggttaccacgggtgatgttgttcaggatatcgatagccaggcggcgttcgaattccagaatgtattgacgcatgtccaggttatcaatgatagccttagagttctgcggatggaactcgaacgaatagttattcggaccagtaccattagttacagcaaacgagcaagtgcggaggaaggtatccatcatgatcgacggaatggtctgtgccaacagacttgcaccaatggaggtatagtctgcaccgctccaaacttcggagtcttctgcctgagaaatacgacggattgaacggccatcgttcatggagaactgagtaacctgttgggtgccgcattcagggaagagccgcttgagatcacggaaagtgatatagccattctccatatacccggcatgatctttaagaacagccaagaaggtgttagtatggatctgctggttcctgcactgggcagcagcttcaccaaacattacatctttatcaggagccccgaacagatcatccccttggttctccattgcattctctttgacagcatgttggtatgcgccaagagtattcgacagataacgagttggagaggtatctcgacgttggctatacttgtatgctcctccttcaccaaccatcgtgcgatggtcgatggaccgattgatcattccgtcaaacaaaccagagctttgcagtttctgtgccacatgcgctgtttgaccaatactaaagatatcttcaggacggatcaggtgagcagttgcacgagagaacattccattcattccacccatcatgtcaacaggagaaacgatctggttggaacctacgatcgacgcaacgtgttggggaccatgaatggtttgttgaatagcttgagcaatgatagtttcggagttgaagtagatacgcatgtcatccggcagataattctgagatgcgtcagcgtggtcactatagccaaagaagatacgttgagtcagcgttcccgcaatgaatggatgttgctcattcactttcatcaagaagcggaaccggcgagaacgccagccatgtgcaataccgacactaccttctaccgatgcttggggagtgataaccgaagaagctacttcttgtacagcacttacccgaaggttcatgccaccatttgtagcttgttccagttgacgagctacttcttggttagcattaatcgagaaaggtcgaatgtgctgttcttgataggtgccggtttccaccagaacaaagttctgtacggacagcttcgagttgacagctgcaccagcggaaatgcccatgttgattccgtgcatgtaatttacctcttgaattttactggttgatctgagcgaggtgtagaaccacttcggtgatcgtgtgcttgatatttggaggtggaatcagaatgttgttctgagcaatctgtccagaaagcttgaacagctcaggtggaccatgatagatccaagtagaggagcggatggactggttacagttattcactgcaatacccgccatgttatctggcttaggaatctctcccgattgggggaccttagcgagtttcatatgcggatagagttcatcgagctgtgccttatacttctgagcaattctcgaaccacttcgggtattactaagctgattagtcgatccatgttcaccgtgataaacaggttcgacttgtaggaacacagctacatcaaggtaaccccaatgccacagtagagcctgggtagttgccaacaatgtattgactggcagtttggagatatgatagaaagcacgcgccgggaaagcttttgccattacccattgtgccagtagtacttggtgaggacggatctcaaagttcgcgacctgactcacgcaactaatacattttctcagtttctccatatcgatagtaggatctaccgtttgtgccagtagctcataatccatcgcatcgatgttgtatgcctcaatgtcgcctgggctaactcgacctttcgtcttgtgtgcctcaataaacgaagttttatcttcgtcgtcaccaccgccgccttctggacgcttttcattaacgcgatcagttggactacgctcggcaggattgagattgctacgtacgtaacggaacgtgttagctacgatagagtgggacattggatcgttcagaggaacgattgtcagtcggcgaaccagaaccttcgaacgaagatgtactggaatttcaactgaactcataccacgccaaaggctacccaaagtagtcggttcatcttcaacgcagaatttgacgtacccttccagtttgtcaaatgcagcatctacatcttcacccacttcatctttttcaagtagcggccagttagcaatttcacaacggctaatcaaaccaacaacttcgttttctttgtggagttcttgatccgtaccagaatcaatgtattctccccaaatcggaaccatcggtcgaagaccaagtgccacagtagcgaggttgatgtagtcatgttgaagataagtctgctcacgcttggtgtagcgcgattcatcagtgatcgttttctggatctctggtggaatatgcagattaccaatagtcaacagccaacgacggagtttgttcattggcagggctgagtacagttcatggatgtaatggatcagcgtactggagatgtgcgccggttcgaagtccatcttgaacagatcgttgattttgacatagctgttccagatacgatcttgatcagcctcatcgcagctttctaggtaatcattaaattccttgaaaacacgagttggatcattgagttttactttgctataagcccttgtactccacttgatttcgtttcctttatggctagtggttacttccacaaagccgttgccttgtaccccagtaacgtcgatgcgcatttatacctctttagttctggtgatgcacagttgtaatatagatctgagatattttttaatgtcaggaaatagagggcatacagcatctctcggtgtttaccaaagagatgctgtagatttatttagaagtcaggaatggaatcgtcaaagccattgtcctggaaaccaccggaggacggacgattgtaaccttgaggagcaccaccgctattaccaccacggttgccgccattatagccaccttgacgttgaccaccgccgccaccgttaccaaagttagctgggttggctacgttcttagcgttctggtcaaaactgcttaccatcatctggtaaatgattgcagtggccggttccaggaaaccggtagcgtaagcttcggacatctctttcggagagatgggagaaccatcaccattcaggatggtgtgatatttcgacggaccgaagaagaaccgaatacgcgggcgctgttgctgagaagagataagagcaatgtaaatacgaccagagttctgttcgcggccgattaccagtgtggtgatcggaatgatcttatcgatctttttaccgccaacaaagtcatcttggtgaacaaacttacgttcttgaggaacatctttaccatcgacaagatcccgtgcatacttcattgcagctgcaaaagtagccaggtcagttttgaattcaatcttaccgttattcagatcaccttgaacgttagtacgtacagtcaggcgaggtacgttaccaaagacaccgaaacgcaggttaggacgtttctgagaaccttctaccggatcagcatgtagccaagtggacattacagagaacggagagagggcagggccttgggattgttgagacatgatgtgttagctccaattggattaatttttacacttcgcgaaagtgtttctacgtactatatcgatgaagagtattctttctaatcagcgtaatagcgcgtaacattctttaagttctttactgccatgagttgtaatgtcatgatagattttgtcttgtgtagttacaggcgaccaacgtctcgaagcagctaactgtttcagttgggccttaatagcttttggttgtgcatcgaaaacaacgctatcgccaaacacttgtagagtgaatttagtgaatgggatgggcgtatcctcttttatgccgttaagcttggtgtaccacaagttgtacggttttattttccctgtgtgggattccaacaaaagaagacgatcgaaatattgtttccacaatagctcatgtggaaaatgggtaaccagagcgatcgtaccttgggtccttactggagctttatcgatctccatcacttctattcctgcatctttcatttgatgcagaagttcaattgccgcgtaacgttcgtatacttcatatgccatttgttttggcgttttggcttctttataaatagccttggggtattcccacttgaccgcgtctttagatgcaatataccaacgcaccttgactttcgatccatgttgccccagtgcaaccggaattgtctgtatttcctgcattaggattgtaacagcatcagctggattaatgccatggactttatccgtagctacagctgaattaagattacgggccaatgttcgaagattgacccatatctcttttaccgatttaacgtcaatcggatgcttaggttgattcgggtgaattcctaagaatccctcaaaggcaagagaagtaccgatactaactggaagctgtccgacatctctttcaatgagttccatatttaattcctaacgaactgtgccaacctttcaagacaacggacttgtatggtctgatcatcagtgacttttgaaatctcttctttaagaagatcactaattgtctctggtgtaatagcgataaacttagacatgtcaaattcttttagacttgtcgctacactattctttttcttagtagctttttccaccaagacagaccattcgtagttaggatactcaactcgaaatgtttcgatatcgccgttagctacgtccattgggtcacaacgcagtcgtatagcagaatacttgggtagttctgctaaggtttcttttactttattaagaagttgtttagtatcataaccgtgaacttctaaagtaacatacttcttagcattcttgttctttataaatgtcgccgtgaaattaccatcctcacgaacgataaaatgaaacaaccctttatcgatctcatcgccatgacagattcgatcgaaagaaccagctgcgtaaattctatcattaatagtcatgttgtggacatgaccaattaagatttgatgttttactaaagctaagtattcttcttcatcgtgagttggttcttctacaatggaaggtagctgataactaaatgcaccatgcataatagcaaagtcaaccttctctatgcccagtgaagccatctgttcttttacctgcgataaagtaacagctgttgatggatgccatttatctgggacataaagaaaatgtgcatcgagcttctcaatatactcaattgacagtgtcttagagtaatggagatcgactggaatatttacgtttactttttgctctacaaagaactgggtttgttccctatcatggctaggtgtaccttcaactattctgagcatcacgttatttgcagcgcagcgcatcatgaacgttgttgcccaacggtttatctggtgtacagattcatcaccgtagttaagctgtcggtcgaataggtcaccagtaataatgaccatatcgagttcctttaacatcttatctgtaataactttatctaagtttaacagaatatgagaggtaggagttgtccgatgacctaggtgaatatcacctaggcttatatatcgaaatgtaccggggaactttgttttatcagtcttcataatcgtcgtcaaatgagcttgtatcagcctgttgacgtacactaccattagaccctttaacgggaacacccccggcgagggtgtacaatggattcccactttcatcttcgaaagtgcggttgtacatcgccaggatgttagctaaaggaatgagaacacttttgtccacggttgtagtaatagatacactacttaagaactccgtgatatacggttcaagatcttgcagagaccgttcacgttcaatagcaatgtaatctactacatgtgaaatagatgcagttgtagcatcggctgcccatgaggtagctggcctgggatacaaagctggtacagtaaaaagaatcttcggctctgcttcattagaagctacacgcagaggatttgtcaattctagtacgtatttccgataacgggttaagttatcagtatcccatggtcttactagtaggggtaagacctctttcacaaacctgtcttccaggataatgggcaactgcatctcgtcgtttgcgatgattgtattcagacaatcatcgattccacgcgttacatgacgtgcgcggatttcttcagctgtatcagtttgatactggctcattcaattctccttgtactttttcaagtgcatctttagaagcaaggatattaatgacgattgcattctgaccttcaaacagttcatcatgttgcttcaggtattgaacgaatggttcggttccatggttttggatttgatcgggggtattaatagatgcgaaatcaataccaccatcttctcgtttggttgcaattacactattctcgtgtgccgttacgttaacgccatcaacaacttcaatagtaaaaccataacgacgtgtggatacttcttgagtcatatgctcaagactttcacgaaggctattattcaacccaccaaagaaactagagagaatcttaatgacacgaagttcatgtagatcttccgattgggtcaatgcttccaaaatttgtttaatagccttttcagaaacatgaagcctttcgctcagccgttctaccgtgcgattaagatgttccactcgttgaatgagtgcatctgtttcattaaggtcaggagcagatttaacatctgattccccatcgaccagtacctgtgcttcttccatttgagaatcaagattcgacatatatttacccgttgttgatattagcaatattcacaatgtgtgaattttggaattgaaccagtttacccactgtatactctttagtaccatcagtgactatacctgtaaactgaatggagaatgcatccggattatctggactcgctggaacaatactaaccaaagcctgagctgattcaccaaacacggttcgtagtttatttgttagtacatcacgaagctgaatttccagattaaggatatcgttagcatattccttcagtagatattgaagcgaagtattttgtgtcctatgtaacgttgacatggacctatttgttgtaaggaaagtagagatgatgtagtctgctttggattccattgaggtaatccaaccatcagtacctagtgttgggagagagactgtcatggcaactccaaaaaaaataataggaaagtatgcggagtcctaagactccgctaactacatcattggactcaatcggactccacgaaaaggaagtctaagaaaggatgtccgaatggcaactcaatcctttttcgggtatagccgccaccgatagcgttgattgcttcccaaatacgaccatcatgaatttccacgaaatgtactttatcattagggtcattggaaatctgtaattgaatcgtatctgggaatccagggggacccatgacaattatttcatttttgtcaattacttcgacgccatcacgttcaatacaacaataccatttattaccgtcgcgatgtatcttaaccatcttatcggggttattggcacagtaagttactacattcatacgccctttttgagcttgtattttttgagcgtaactatcgagaatagggcgacgtgctttattaggatcggccttaaacgacaccggttcgatcatactaaattccttatatcctcgttataaaggagtcccctaagggactccgtttatgttgttaacccaacaagttccctacaggactggttggatccatttcgttttcatctagagcaacattcacaagattccatgaacggagaatatcaaccttctcgtagagagaaagctctttatcaccttctgggatttcttcgtagaactgcttgactacggtgtggtcatcattgacaaccagtacttcgtccatcacacgacgataatcgtaatggcgttcgccaacacgatcaccatgatggtttacatacgaatcagcataaccttcaaccatgttgttcagatacataccacgcaggcgttcttgtgccatgatgtatcgttgcatgatcggatttgcggtttgcaattgctctaacgtgtacagtccgtgaatgttgttagacatccaactgttatccgttttagcaacaatgttccgcatcgcctgtaccgctgtgctggtactgatcatctggtaaagattttgtgcttgatcgaagaacgaagttgccatcgaactcaggttactacgaagtgtctgagaacgttcacccaaccagttcgtggtattttgatccagatggccaccagcgacgatgtccatcagatcgacgccgtatgcctgttgtaacatggattactcctcttggatcgttaagctgctttcgccaaccattcttccaaggacggaagatagtcctcgtgagcatagttgatgatggtctctactaccggaccttgtagttccaagttacccgagatctcgtgcggatcatcaggactcagtacccaagtatgcggagcgattcgttcagttgcatcagccagatagttatcgggcatcaacgtcaaattcaactgatcgccgtcgaaatccgcattaggagctttaagacagaggaccgacatgctgatcgagttatcgcgaatgtcattcttgataacggtgatgaagaactgttgagtcgaaccacgttgcagagtcgggttgcggtggaatacacaaggaagacccttatacttcgattccgcgatgatctctttgaacagttgatcgatgacttcgttgtacttcagaacgttctcgtaaatgaacgagttcgcttggcgagtcgtcatacggaatttgcgtttgagcttgttgatcagatgatacttcaacagctgacaaccgacaccccacggaatgtgaagttcatcgtaatcatgcggatcactgatagaagtaattactgcacgcgcagtcaggttaagacgaccacctagtacatgtcgacgaaccaaaccgggtttctgtgcaattcgttgtttgtcgtagttctcgtggaagatagctagaagcttcagtgcacgagctacacggttttgtacagtgattggtttcagcggaattgccgaactaccgatactactaatagtcagtaccgcatcgattgctgcgccgatcggcttatcgatgtaaacacccgaggtcgtagactctacaacgaagcagagtttagttgggatcggaatgttcttcgggaacagatgttctttattctggttaacgaatgcagccatctcacctttgttggtattgatgatactgctatcgagcaagaactggaagatcgtatcgaagttctgaacgaagttgttcagtccacgcgggaactggcgagccagcaacttgtcaagtttccgttttgtttccttcgaactgatcgtatcgtaatcgtactgatactgggtgttggtcagatactccaggaagtcgaattctttcatcgacatataacctgaaagcataatccacaactcgggactcaccagacgatccaccccttccggtgcccgaatccacatcgatgggacgatgggtcggttgctcgtgcttactactggtgtaccgcagttatcgcagattaccccaagcttgtatgcttctgtgatatgctcacagtcacacgaagctgagttctcgatcgcatctgcatcctgataatgggagaacagataacgttggaattcctccttttgttcagcattgctggtattaaagtcgttagcgaatactactttacctctttggttagcgagcatctcgtcatgattgacaacctgagcatatagacccatacctacttcctattatgtctcgacaaaaaaaggagatagaagcggctcccgaaggagccgccttatctactatcgatggaccaccaacggagcctggcacgatcctagcgtcgtctacaaagcttaacctccgctcttctctgtagcactctggcactaggaccttttaccatccatcgttgtttgatcacacgttacccaagagtaactcctttcggttaagtgatcactcacggcccgtgtagcgagaggtcgacctagactttacgcccactagtcgattacttcgcggaacctactcctaaccgttatcaccgaagtgaaccagggtcgcagtatttgaatcgggatgccagccttctgacacccctatcaaccgggggagttgtttcttagtacagagtaccaaccgaacctaccatgttcatctggtagccgccaccaacgcccatgccgttgacaacctgtgcggtagaaccgacagcgaagtcttggatcatggtgttgccaacgaagcgctgagcaccgaagacctgtgcaacgttgtccattgctacagtcagaccagcagcagcaatcgccttatccagaccctcgatgaacttcgggttgaagataccacgatgtgcacgagtggtgtaggttacagcacccaggaacgcacggtcgtagttcttggattgcttgttacgcagttccggatggatgttcgggttgcattgagtaccgtaccaggacatccactcttgttggttgccctcagcagcgttcagtgcacccagtgcatccaggtcacgacggtcacgtttctcgtcgccatcccagtagtagcccttgttcacttcagtgccagtcgatgcaatgatcggctgagtgttgaagtcgaagaagcgctcgaagccaccaccaaccaggttctgtacagcgcgaatgatcgcggcagtagctttctgttggttcgggccacccatggcatccaggaagattacgtccagtgctgcgttgtcgcccatgcgatccagatcgatcaggaaggacgggttcggacgaaccatgctcagcatcagatcagcgaagttctgatcggtgaaggtatcggacttggtatcgatcttcttacccaggttggacagccaacccagagcaccgatgtcacccaggtctttaactttaccaacttgaggcaggaacttacgagcccaagcctggccagcggttacgcggaaggcgttcgacagagcgaagaggtacagttccagagtgtttgccttgatccagttggcctgacgaatgtcggttaccaggatcgccggggagaacggcggcagcggttgggtctgttgaccgaacatctgggcttgcggagtgggggtgtactccagggttacttgtaccgacacctggttaagcatggtgtctgcttcgtagaactcgttctcttgttgaccttgtttcttggtacggttcaggctgatcacgatgtcggacttgatcgggttaccgacgctgtccattaccggacgaccggagaagtccatcttggcagccagggtttcatcttggccgcgcagcattgcgatctggaacggagtctcgccagctttcttagccagaacgtcgtcacacaggttgacggaacggatcagaatgtctttcagcaggacttcgtctttcagatcgaattcagccgggatcggcagcgggccagccgggtgtacttcagccttcggacgaccggtggtctgacgaacgaattcgcagatgcggttccagtactgaacggtgaatacgtcttgtacttcgacgtctacatcgaagcgatcgtggctcatgccgttctgaatggtaacctgacgcggaggcagggtgattgccgggttcggcatgatcagcggacgaactacgatgataccgttaccaccagcagcgtgcttgacgatcagcagcgcggagtagccaacacggttggcatcacggtcgaaacgcagaatctggaaatcgttttccaggtcttgatggtcgatggcatctttgccaacgcgggtcattacttgcagcgcttcgctcgcacgggcgtcgccgccatcagtacgaccggaacgtttgaacatgttcggcaggccggaaataccgccttgcagagcttgaggtgcagcttgttgcatacgaggagcttcctgttgtgcgcgcggagcagcttgagccggagcgttgttggcttgagcttgagtgttttgagtttcggtatcacgaatcatgatttgttcctatgtttgtaacgtttcttgatcaagaatgagatccaacagtgtattggattcaaaactgttatatagatctcagattttttttaatgcaatatagaccggaggacccgctataaaagcaaggtcatttgaggacattcagtcttcacatactgtattacatatttgtttccttaagattcaaacttcagtatgcagtgatctggggcatagctcaaatagcaggtcaggacctcacggtcatttcctgtattaaataactagccccagtatttcttttcttatttctcgtcagacaggaggtcttcaagatcatccaagtggtctttcaacttactgtagatttccttcgcactcttaatgttcacaactttactgagttgatcagcgtattgcgcaatcgccgaagaatactccttcatgtgagtgagcatcgtgtcatcaaaacgattgtcatcttcaataaaggaagaatgcaaattgcgaagaccttgaatggccgtcactggatcgatggtgttgtttttaacacaatcccgaacatgcgccttgacgatagagaatacccagtctcgttccttcttatctttgatagaagagaaaacaatagtcagcggagaacggaaatactcaccccggcgaatactatctgccgaaagtgccgcaatcttcatcgattttacattgcctccttccttattaattttatttgcggtttcactaatacgctgagcctcttcaacaagaagttgtgcaatagaaggaccagagaattcacgatggatagcagcacgcgcttcttcctctggggaaagtttaccactcgtgaaagcagtagagatccgatcaagtgtatgcgtattctcttctacatgtttgtcattatcgttattatcactctctgcatagtagagatcagtgagacctgggttttgcaggtatgacgaacttttcactgtttcatgttcgaacccagtattgatccgattaccaccacggaaaatagaaggtacggaacgaaggcgagtttcagcaatgaaatcatcaccgagttggttcgttttctgggagggcgcgtaactaatcggacctttcgaagtatactgaccaacgatgtacgggttatcgtgtttgatttcctttttctccattcgaccagtagagatcaaccaatcttcaaacagcatcccattcatctggccggcttcacagcaacgtttatagaagttaatatatttcccataaacgatagctcgttcatcgagagctttgctataattggaattaaggaagttcagtacttccccaacagttgggatcttgttcgaaggcaggtttcgaatatccagatcaatagctactttaactgccagttctttaacgaacttgccgttatacccaatgaaatccatgcgatgttctgtaggtataacgctggcgatgaagtcagtaatggcttcggcaagattaatgtcaatattcttgtctttggattgcatctcactattctccactttgtcaataagttcgtcgtatttaccggactgagccaacatgataccttcgcgttgtctctcgtaataccagtcttcaaaaagaatacctgtattacttttctgatatgtttctttaaatatactgaaattttcagacatcgctttaacgcgatcagaaacagtattaaggaactgaacacggatgtgattattaataacgtccgtgggtgcatgaaaatccggaagggttttcaaaatctcatcaaacatggctttaacaaatttcgggttatgtatcacgaaaagatccgtgttaattcgacccatcgtttcctcgaagaaacgtctgagcgaattattgacaacagcaagtttataagaagacgtgctgttcaatgctttatttatcattacaatttccttttctttgattagggtgaatatatcaaaactatgatatagatttgaaataatttctaatggacgaaaaccatgtacatgctattccgggacgccccagcgcggcgcttagggcaagcagttgacccaaagatcgtctatctccgtaggacgtatcgggaactgatcaatgatgtaaaaacgtattaccgtcgagcccccaaagcggttggctcggctaatattttcgccaacatgattcaacattttatcatcgactggaagattgatgatgccgcttgggcaaagaagattgaagatcaggctaaaggtttatcacgcgtatttggtcttacctcagctattaatagagggaagattcatgagaaggggattacactaggtcccaactgtgaagaagtcgctattgccagttatgagaagttcgagaaggagggtctcggaaagcgctggagagatctgactccagttaaatatctttatcatacccggacagacgtgaatcttccaatgatgaataatactacagctggtaaaggttacggtgttatcacagttaacattccaatgctgttagttcaatatcgctattggttacgttggcaacaacaacgtggtgtagaacaactagagaatgcctatcgcttcgttgggagtatcatcctccccaacatggtagagagctatttagatgttgcttacttcaataggttatctcgacaagcacagggtatcaaatgtttgaatttccctgtatctcatcctttctatctaactgacatgactccacgggttgataagctcgtagagaatgtaaactttgagaactctattaaaggcatagagctggaaggtctagcttggattactcctgctattgttaagactaatcttttcgaagttatggagattcctcgggaacctatcacgtatcaaaacgaatgggcttacactttagcacgtctaccgtacattaagtatctagtaaccatgcttaagaagaacccaggttacgaccgttcccagatgaacgaagtattaatcgatctgattgacgctaccaacgaccaagtcttcaaaaccgctggtaataccgaaatggttaaagcgctacgtcgtgatgtagctatcctaattgaagaaatgaaaaaaacataataaacagcccctacccgaaggtaggggctttatgtcgttatttgaattgttccaagagtttatcgtagaactcttgattcttcttcttagtcgcctcagcgcgaagaccgaccagttctttcttcagtactttagccttgaggaactgataaccagaataccaattgatatctttagatggaacgtcttcacactcagcatatacatccgacaacaaacgaatgtaacgctgattacgaatactgttctttacagtttcggcttttaggttagggtacttagcgatcagcttatcccatacatctttctttatcgaaatagagatgtgctgtgggtcgatctgccgtctaactgatacagctagtgcagccataccagtcacaacgaagtcattagaagataaattgtaatgactcttaaccctgagtagtggaccatggacctttgggttatggatcatattaacctcgacataaagcccagcttaagctgggcgtttaagttaaacctgttcaccgtcctgtacagagacttcctcaacaggtttcaggggtttactatcagcacgctcttggaacttatccaggagacgtttctgatactcagggatagcctcaccggaaacagtttcaacgaaagaactcaaggtatggttcttgaggatctcacgtttaataccatcttgggtctgagtttgaatctgactcagcttagccaaaatagatccacccatcaaagctttcaccataccggacttacagttggtgatatgcttggaacgcttggcacctttctttttcttacggcgggtgcgcatgcgggattcgatcgaatcgatttcggtcggctcagcttcaacagtttccattttgctcaggtgttgttccagaaggtcagtagacatttcagattcagtatcagtagattccaacatgatgttgttatgtcctagttcacgaagtttattgtacatgtagagacggctattcgttttgggaatgtcgtccaatacaggagaggaaatgatttggagttcgcccggtttgaaacccttggtgaaaacgtcgtttatactcaaccattcaggaggagtaacgataccatcgaactttggcatttcattacattcggtatcgtaggtgggtatctttttcataagtacctcatgtcgtgtaccaggtagttcaccgtttttgctgatcaggttattgtactgggtccatagtctttggctttgcgaagttgtcgatcttgtaccatgcaatacccagctacgacgaacaagggtcataccagcccaaagagtttctagttgatccttagagagttcttcatgttctttcatgaagttagcgataagatcatctaattcttggagttcatccggtagatatcctgcaagtgtataacccgagtaagaatctgtaatcagtttgccttccggagcgaatgcctgacgtagagcaacatcaaaatggcagtacatgttgtaatccaacagtaatgcttgttccatataggggtagtctaagccaagtgtacagatctttgcgaaacggctagctccaggttgagcaatctcaccacatagattaccatccagtacattgtaagtaccgaaaggaaaagatacaacttctttattttgcgttggattggaattatacatcatattttctcatctgtggatttacgacataaaggagtcccgaaggactcctctggtttaaagttttccgatgtaatcaataatgatcggtcccttgaactcaataccactacggactatgcggtcgttacatggttgcttggctgtaacgataaccacatctttattaaacgtgaatttacgcatacgttcatagatcattttcaattcaggatcgctcattattcacctcttaatagaaatcggaaatcaaacgagtgttacctttatcgatcaggaagatacccaaagattcaaagatcagatagaagacacccatcgtgttggagatgatcgtacgaacatccgctacacgtgtgatctcatctgggataccacggttttctacaacagacattggaacatggaagttggtaataccagtcttcttattttccatagcccagcgttttagacgcatggccaagcctttatcttcgatggattcaacccattcgttaaaacgggttctgttgtccaccgttacagaaatctttacgaaactataaggtggttcttcaatctcaccaaaggatggactgcatacttctttccagaaagtatgtttggcataagtggcattatcttcagatttgtatgcatctattttcttacacttaccagtggtaagatattcagctttaccagaacgtacagatgcgataatatctctttccagatctgctacttctttcaacattgctggtagatctaaaggtgtttcagctttaatggatttaataatatcatccatcattcgcttagcggtcttgttaatcttcggtggaactttagaatctcgaaggccgacacctttaacttccatacgtgctttagcaaacataacaccctcttgtgcatcttgagacgcgtagtagtgttttgaacgtgtggtcagggaaagtaccgcgaagtaatattcgttcttcatagcgagcaggcggagcttctctttcgatacgcccatgttagccgattgaatcgctagaatgtgtgctacaacacacgacaccaagaataccaacgcaaacactagacgcttggcttcgtcagtgaaagtgatcttaccaaagaactcttctacccaatactgcatcgtgaacatggtcgagtctgtatcggaaataacagctgcacgacgataagcagttgggaaagcatgaatgctggaaggaacgttcttggtcagcaatagtgcatcaataagacgcttgtatttccacagcgtatcagagatgttcttacctgttgcatagatcttgtcgaatacttcaggagactctttactcagcttgtcgtagttacgacctttaaccaagtcaaagcagatgaagttagccaacagttggaggtcaccatcgtaagtgttgtaaacttctttggtaaccttttgttcatcggtacctactttagcaagctcagtcaggaaaccgcgaatcaaagttttgttatgtttgtaagtatgatacagatcacctacgtacataacagcagcacgttgtagtggtgtgaagccagtaaccaacatccgaatctgttcggtgtagtcacggttctgccaatagtgcgccgtcgaatacagaaccatctcaaccacttcttccggagtcggatagtgcatgttgaaatgttcgatgcaatctttcagcttcttcatgtcggtgttgttagcaatcgacagaagattagccttggtgatttccggactataatagtgacggttaccggtgatgaacttctcgttgttagcgttagcatacgaggttgctgtacggcaggtcgatgtcaaactggagtgagtcgacttgtaatacagaattgttgcagctgatacggttgctccactataggagttattgttaattttgaagttctcttgttcgcctttacgaacctgggcaagttctgctgcttcaggagtaccttcaccttccaaccgcatttgttctttctttacacgtttacggttagcaacaccttcagcaatatactgcgagtgtgtagactgtcgctgtgattctgggagatacacagtcatactcggcgacagcaaaagattctgtttttctacgcgtccaagaaaacccataaaagtggtttctttaagactacggtcaccatgggggtttttatcaaccaccagggtttttggattattcaaggcaaattgaccttgaggacgagattgttcttttacaaactccagacaggtttcaaaatcatctcccgtcattgccgagatataaagagcctgatcattgaggtatccttcaatgatgttcaagtcacgggcatattcatcgaccgggagaatgaacgggttaggcatactgcactggttcatatttcctctcttaaaatttgatctttcaagagatggctacgctaaaacggaaaaaaattaggacacccaatggatgtccaaagattgagcggtagcacatcaaattactttcacatattgatgtgccacaaggtaaaagttcgcgacgacatatatgccctccgagtggagggcactatgtttattccaagacaactgaatctggaacttcgttattcatcttgcaagcttcgatgattcgttccaaacgtcgttgatcgatattctggaatactaaggtagctttctgaccgttgttgacgaccacgcttccttcacgaatccatggaataccaatatactggtgctgcccaccttcaaattcaacgcgtacataactgtactgcgatggatcgtttggtgtacccgctgggagagtcggatacacgttttggtgagcggcgattaaatcgaaacccaggatacgtacaagatttgcgtctaggaatgcggccagtgttacattcttaaagttgtttccgtattgtgcagacggataaacttcaaaactgattttctggccaattgctacgtcacgaatggatggcatgattgactccgttgaactgattgttaagcactcataggtttgcgcgaaaccacgaatgcaaacgatccattcatatcaatcggccacattgacagaacatctaataacgggttattcagtgtaaactctttaaagactttatacatctcaaccacgttgatatcatcgtcgtctaacagatcgtccgtagcgccggctgattcgagaatatgtatcccgaaattgttcattacttctcgttgaaaatagaacagaacgcgcttacggatttgatcaaccggcaacttaatatctttacctacagttgcagctaattcgtcttccagggaatcatctacttcctttttatcccgctcgtccatccaacgatcctgatagaaccgcaatccgaatctctctgcatactgagctcctgcaattgtaccagctatgacaagatcatgtatcatcgttcaatcccaacccgatttgttctttagttacgctaaggggtgaattaattgtacgcaaatatgactcacgatcctctggcggcagcattgcaagctgtagctcctgttcacgttcaagacgagcttgttcgcgatacggattgtcattaggattgtaaggttcacgtacatgtggaccatcggccggatcatctgtgtatggagcgtcaggattgtcaccgaccagaacataatagctgtcgtactgaccaacagcaaagttctctatcttatcgattaaacaaccattattttccaaatcagcgatcgctggttgaagacattctccgagcattcccgttgtctctgcaaacttagcttcaagataaagcatagttgtagagtcattaataagatcattcttaatgctcgggaaatattcttctacgtagtgtacaaaacctacgttttccttagctggggcagttaggatatattcgacgtgtttgttaacacagtcttgcatgagtgcaataacagaatcttcttctgctacatgatcgtcttcgttttttggtacatgtgtctgtaacatcttgttccggacaacatctgtcatctgaacaatctgacgatcaatcactttagagttgatcatgatcccgcaagtacggggaccagcagattcttgaatctgggttggggtgatgtaatgggttctattagcaacaccaattagatcaacggtgccatccgaattgaagacaccgtgtatcacatgttgcatttcttggacattcatttaggggcctccatggagatcaccattattgagagtttgtatttgtcataacctactatgttcacagtagaaattatctctgattttgactggaacgaacgtagggtagataccatatcgtccttataggcatttacacagacatccatcaattctcgaaaacggaggcgccaatcgacagcttcaccatcgtcgttaattgtctttatgatgtcctgaccatcaaaatcttcactaataagagataaataagaatcctccagatagagctcataatagccatcccagctcggtaggtttaagtgcccgacgtactgccgaacacagtcggcaaagtaagccagcacacgcttaactagaagcgcgttttcttcctttaccaactggtcggttaaagtcttcgattcgaaaaccagtaacgatcgcatgctgttgccacttactcccatagtactctagcagaaatctagcagctgttcctttaaacattatcgggaatatactaacaattcctcgtggtaatgctttcagaaatatgatcgcgtgctctagaaacaactcctgatatcgttccgctagtttaccattataactaaaatttggtatggtaacatcctttggtattacctctggattttcatttaacgccttagatacgctaagtacccaagttataacgtcatcccatactcctcctggaccgtagcccttgaactctttcttcttgtagatcactcgatgtaatctttcaagctcgttgtaattagggaagaatattcccaggtccattgagaagactagggacgcgggtggcgataacatacactgcatctccataagttcttaagtaacgaagttcaatggtgtcggttggaaggtatgatattatctcttttatttgtcgtcggattgtcctaacgatacatttaccaatatctgaatccataaaaacttcagtgataattgcatcgtcatcgagatcagttccgtgacctatatcagcctcagccatcaatatagctaatgagttgatatcggataccgtgaagccaaccaaatctgcccatgcttctatttgccaactacgaggtccataaagaacatccatggatagcctcacgaatatcgtctcacgcaacgtaataccccacgattaagtagactgtatctgatttctcgtctaagtaaacttttctatttgcgtagtcaagatggatacaatctgggataagatatcccagtgccttaaccctattcatgacgaactcaatgagtatcttgtcatgagtgtctttgggtttagatttatttgactctttcttgtatccgcagattaaaagaactgatttctcaaagagctcaatatgttcttcattatcaaagtcaagctgccagcaaatagatgtggcaattagatcgacaagaccttctcgtccgatattacgcattacatcgtaatatttatcatcgaccatgccgatgaaatccgacgccttgaatgttatcaataactgttctttcacatttatctctccggcataaagcctcctttcggaggccctatgttagttattttccaaataccaacgttctgcaatagcccgttgttctgggggaagataatcgttacgaaggaacgatgcaacaagctccatcatttctttctccgtacgactgatccctttcatttcgtatatggcgagaatgtgactagaactgtattcaagcgtgtatttcttatcccgtttaacatacgacgagaagtaactcaggccgaaagccgtgataactttacgcacgtaattttgtttgaattcctccatgttagcaataccaacaagtgcgaacaaatcatcgttcacttgaggacaaatgggatcaagggttatcattggatacatagttgtcagtgtatccaagaacactgctgccatggctctgttgggattattcaggaaatcaattactttctgaactcgttcaggtgtacgatgtttacccatcattgcaattgcacgggtcaacgtatttggatctcgcattacggctccaaatgtacgcatgaattcaccatgcagatacgacactagagaagtgcagttcaatgcaatctcggcatggctgtcatcattatgctgatcggtcaggcgatagtattcttggattctatgatcttcaccttcagcaagcccaataaggttaccaatgcagactggtttccattcggtataggtgcgtcgatcaatgtggtgttccaattgattatcgatttcaatcgtaacgccttcccagataacatcactagcaaagatcttataaacctccagttgtttttcatctaatgtgcctggaggtgaattaaatagggcacctgctttatgtacctcgtagtcaatctctgtttcgaatgcacttcgactagtcaagatttctttgactgtaaggaacaccagttgaatagcggtgttacgagtcgggcgcggtagacccagatgcggattgcttttggtaaagtgttcgagatatgtatacaggacatctacctgtgggttaatctcaagcactacaaaccgtttggacgacattgcattgctccatttattaattgataggtattgctaagtagataacagaaccaatacgtctgtaaccaacatgcatcccggaagcttccactggaagattgagagtgtcgtaaagtaatgaacgcgcctcattatgaaatgccatccattccagttcggcctgcgtgttacgatatggtgcgtaacccattacaaaacaacattgaaacgaatttattgcgttctggatgaaatcatctattaactgttccttagcttttaccaggagtcctgagaagtcagtagtatccatgtcaaccgattcaattgctttagatttaactaaagccatgaagggtggttgagtaatggcctttatgactccagccaactcgaaggcatgaagttgaacttgtctttgaggaatcatagttagtattccggaaatcactcagagctatgatatagatttgaaatcttttaaaatcgtcacagaacccccgttgtatatgatacccaacctgggtattatctccatgggtgttcgttcgctggcgagcttcctaggggcgtttaaacatgaatgctattcaatatgcacttcgagatttacctttccgaattccccgtcagattctagagtctgttttcattggacaagaagctgcatctaatgcagctatttgcggtgaagtcatttctcttgaaactagaattcgagaggcggtattagaaccacgtgtctttgcagacatgaacttgatcggtggaactaaaacttatattccactggactttcctgttaagtctgaatatgtcgatccgtacactgttatttactatatcccggatgaatacacccaacagcgtcccatcgtccaggtatttagtattcacttcggtatcctaggttatcagaactctggatatgcaatgcactataatgaatcgactattggtgctgaatcacgtaaagtattagactctgcgcgaagactacctgttgcacagactgcatacattaacttgattaaccataacactgtaatggttagatttatttacttgccttcacatgccgcgtatttatcgtgtcgcttgggtaatgatgacgagttacttaatattcgtcctcaggctatccctgtattctctaaactagttgaatatgctgttaaagcctactgctataatgaactttacatcaatatgggtgaagctcagttatctggcggtcaagagcttggtgtattccgtgacaaagtttacgaatggtctgaagcgaacgatctctatgatgagcaactgaagaagtggcggaaggtatcccggaacttcaatgaccctgaaggtaaccgacaccatatccgtactatcatggcggcgccgtaagggcgtaggtgtttatatgttcgagtctttactcgctacattagtcagaactaatcttggatggcaaggaatccctgtacagggtcctaacatgcctgttactagggtaggtgcacctgcaaccctactcaatggtaaagtatatattgctggtggcggcacgcaaggtggaacaaatggtgtatccacttcgacgttaatgacgtatgatcttgccactggtgtgtatgatcaaaacttcagtactgttccgtcgtctgtatatttctctggtatcgttaacgatggaacatatctgtaccacctcggcggcgctacatttccaggtaatgctgttaatagcacttttgttaggattgatccattaacaaaagaaaaactggttttgaaatccccacctgtggctcgttacgatttccacatgttctatgagtcgggctttatttatacttacggtggcacgccgtcaaacgacgtgttaatgaaatataatatcgctaccgacacttgggaaactgtaacccaaccaacacttcgcccgccagctagaacatcgtctgctagtgtttatctaaatggtaaattctatttaatcggtggcgttagcaatcgtaatgatttctgggaatatactttatccacaaatacgtggatacagctaagtaatttcccaattactacttgggttggtagtggcttcaccatggatggtcggatattcctgatgcctggtgcacccttaatcaataacaacgcgaataaaaatatctacgaatatttacccgatgaaaataaatgggtattgttcaagaatatagctaatatcgtattcaattcgagtattgtatccgatggaaaacggttgtattgtttcggtggttctggtaacagttcagtcaacgctgctagtaatgccatgtattatctaaaataaaaaaaaaataagcatagcccctaccttcgggtaggggctttatgccattatgacaaacgctccaagcattccagaacgtcatcaggatcacatttcatgcaaaccaaatcaggtttcgatgccgatgcttcagcaacaagctctagattactatcattaatgatgaccttatcttcctgaacgaagacatcccaatccccataagtccaacggccctgaggattagtttcgacaacacgtttggcttcagcttggatcttatcaaagaaagcttgcataatcaatctccttacacgttattaagaatagacaggatcattgctttcggagtaacgccaacaccggcacaataacgacggaaagattcgcatggctgtgtagctttacgttcaactacattcaagttaaagcacatgttaccacgtgcatcaagaatggttacaaatttactattgctggttactcggtaatcacgaccgagaacctttacggttttgtacgcatggctattcatgtcgtgatacctctaaggtttattatcacgtttgtaatatagcctttaaattggtttgaatgtaaaaaagaaaaacaaaataaacccaccccgaagggtgggcctgtatctaaatgtttactaaaagagctttatccaacagcaagataacccagaaagaaaataagtatgcttcaacagcagcaggcttatatttctgttttacatcttccattaagttgaatacatgtatcgaatatagtttacctataatagcaattatcgctacaagcgtaacaatacccgcaccaatccacatgctatcaacattcttattaaggaagccaaccgtcacgcttgccatgaatacaacaaccgtggttatcaaccaattagctaactgattaacacgtagctccagttcaggatgacggttattgttatcgtctctatatttctttttatctatcgcaatgatagtaaaggaaataccaagaccgatgaagaaagacaaaaatatcgcaaacagacttatcattttatctcaccaataacgtctaaggaatacatcgagatcttgtacagcacgatgatccttagctcgtactttagggtctctcgattctatcttctcaagggcttcaaacgtttctttcaggtgaaggggatggagaacttggacctcgtaactattaacaagttgtccttgttgctcctttgtcattttgcgcaaacgggtgaaatcatagaagacaatgaacttaccttgatcgtcttctgtctcttcgttaccagcttcaatccagcgattgtattgagcaggtgtcagaaagatatcaatggtattcacttctttacgcagattgtaaataaccattgcactgagatgacctagggccatttcttcaggtgggcacttattggtagtagcccaagttttcatgatctcgatgatgtgttcacgttgcgacatgctaagtactctatagtgattacatatcagtagttttggagtgtctttccaatacaaaactgtgccgtactgatccactgacggacttcaccttgcgtggacgagagttcaatttcatcacccgtcaaagtggcagtgagatattcctttgtatgtccgcgactacgactagaaaaggtaattacattacccttctttttgacagcaagacgagtatagctatcaccagctacgcaggtttcatcgagttcaagttcgatccattctcggatcatttctttgagttgctcatttggactttgcattaactttctccatcgcttcaattgctagcatgataccagcacgggtagggataggttcttcagtagagtaatcaaacgtcacggtcttttctgaaagattgacctctacgggccattgacgccatctggcggcagtgtgacggatccacagtatatctttgtcgataggagaactgtagaactctaggttattatgcacgctatcattccacgcttgacgtggaagtttagacacccgatctacgactgtcttttcaaacgatcgatgaacgataaattggagagtgttataaattaactcatgggcactatcctgatcttcagcccaaagacagttgatacgatcaagccgtttcgagagaggatcaagttcaaatacaacatcgggacacaaccgcttatttggatccgtcccttgcatcaggatagaatttttatttggcgcataccacaattgaacatggcgtttggtattagggtcgatacatgcagaacgctgacggccgagaagtctccagatctggatcagggtagctatatcgttaaacatttctatctcccatggacataagctctcccatctaagggagagcatttatgccactttttctttacatgtttcggttaatgttacaccccatccgggatgactctttctgttaaataacaatggcttactacgtataaacggagcatcctctgtaaaaacggtgaatgtacaatgaccggggttgtcatcaatcttgaaatagaaattttcttttaggtcatctactttagtaatgttcaatggaattaacattccacccccatgaacataccaacgtttgtaaatccttttagcaagcctatcctcgaccattggattagactggaaccgagctatcctcaaacgcattccattgacttcagaccacgcatcaactttgtcgtaacatgtgactccattcttgtcatatacaaacacaaagccttcaagaacgccgactaaggtgacggcatggtgtaacatcgctgtgtaattggagagttcgaggttaagctcagctgccattagctcatcgagctttttcgctgctgtcttagccatcattcctccttagaggtttaatcaggtttcattattgattccttactgttgttaattgatacaaaagattggacggttattaaggcttcatataaccttgataacgttctatagctcgttcacctacggctttacgatgttcatgcatttcaacagcatcgcgcctggcatacgtagcccaaatgcgggcactgtccattatatccctttgataaaggtcagttccactcagagcttgaataaactcatcgtccggtagatcttcctgtttgtagaaagtatcctctgcttggatataataaaacagtacttggagtgcagcccttgtctcggagtcagagagcaaagctttcaatgcactgcgcattgtgttattacagacgtcgcagttaatagcgagttcaccaatggtaatacggtcattctgtgccacagttcgcatcaatacttcagtgcaatcaacggccagtttgataagacgttcaggtgtaagctttatcatttcttctccttacaaacaaagataatcttcgttgttcgatttgtattgatgacatggagttcactgttatcgccacggtggtaactgatattccaattattccgggtatacaaagaactgtgttgatcgatgatggctctacacacctcaatggaagacacagaaacttcttcttctttaactataggtaattcgccaatagctccggtagagacaatggtagctaagatccaactcatgaaacctccagacggaataaaaggggagccgaagctccccagttatttagaggacgaaaccatcatcagaacggttgtcatcgatatcaacgatcgcagctcgttgggtgtaacgaacttgctgacgatgatgttcctgtttttgatccaggagagacttaatccgctcttggataccaaccgagttgataacgaagtgcagttgctcagacagagcgtcttcgtcgtcaggggatgcgatacctacagtccgaacaaacggattaccataagctacttctttggaagcatctgtgtacagggatgcgacagaaatcatctcagggacagaagctgcttcttgacgagaagtatggatatgcagttcacacagttgcggttgaatgtaactatgcttactagtgaagcgtgcccagtgatccagatccagtacatcgagacgttcatgtttctgattagacaggtaaatcagagcatggacagcaaataccgcatctttgtcgatttcggaatacggaacgccgttcacgttttcgatcggacagatgttgatcggggtgttagttgcagcagcgataccttccagagtcttcatggtatcgatatcgttttgcagaacctcagtggattcaataccactgacaacgaccggaattacagtttcaccagctttagccagagccgatacaatcagcggaccaagaacagaaccagaaccaccgcccatagaaaacaggacgatattgaaatcgccagctggatatcgttcaaggaaaggtgcaatctgatggcgaaccttaggcatgatgaatgcacggttcttacctgccccacgagtaccctcggtcaaaaagacacgatcgatatcatgactagaacttacgttcttatcgcaggtgtcaatgtataccagatccggatgccattgaaggtttacaccaatattcagaccagcaccaccacagcagtatacacgagtttttactttagtcatttccacgtttcctcttgattaaccttcttgaattgtaactagcgtgtcgcgttcttgttcattgagcacagtcttgctgttcatcccaaaatgaatactaccaaacgctccattgtcacacatattaaccgtaactccggtatttgttagctaagaactagctcttggtctttgaacgaattgagatagactttaacctgaacatcgactccaagatagtaacctaccatcaaggttaccgtacagttatcgtgaaccatggtgttaacaatggatacattgtccagattagcaaaattcctgattgtcggcgttatccgataaatcttcggaattgactcgaagtcaaactcgtgtctttcactaaccttcagtgtattcagatccaagaacgtgattgtctttggacgacagtattcatcaacttcgacatgtttaatcgcagatgacgtattctcaggaactagaagctgatatactcgatcattactgtagaaagtaatacgaccgatttcctgtttgatccactcactgggtttataataactaaccgaatgaacggcggtatcgaagctcatagaactttggacatcgaagaatttatatccttcggcaatcatcagttcaataagcttctgataatgttctcccaatcgatgaactgtattacgttgaccaattgcactgaagaacgaacctaggttctgtttagtgatttcaatgtttgcctcactaggtttgtaggtcagttcgaagtcttcctgtgttacgttccattccgatactttcagaaagatatcgttggtaactggatgaactgcaccaaaggtgatttcatctacgttttcaataaccaggaagttcttgaagatatctttgatggctggaagtgcctcgccaatagatttcatttcgattcctctttaggaaggaccaagaaagtaaacccgttaccacttgcatggataaccagttccaatttgccaccgttgtcgatagcatgttgcatcaggcggttgtaattgatagcgctcatttgtatttcctcaggttagaatttcagaaatgggtaccacacgaataatcagggtcgttggagattgatactctttactaaccgttgccattatcactgacggataagaacagagaatcgtcttaggggatatcatgtcgactttgaacttaatgtacatctgtttgatcaactcatggacgtcttcgtcgttgttaaccaagaacaaagaatcagggatcaatgttttcattttcggtttttccagttttacgagttaatattcaactaggtaatatagatttgaaataatttttactactgggtggatggggctttgtagccccacgacaccctcttccaagttttgcgacatagtcgtttttgtttccctaccccgtactaaagaataaggaaattatatatgggacccccccaaagggtccccccccacatataattactatttatataaaatttcttttaaagaaaaagcatttaataaggaaaatactttttattaaagatatctattctttaacaacaagttacttatgcgcggccggccccgcgaaaaaaaaataaagtggaataaccctctcccgaaggagagggctttatgccttaacgattgctaagcttgatcatggagacaaacttaggatcccaagccagcctatccatatcaaagtaacggataggatgcatcatgaatccaactgcaactccatgatagatactttcgacatcatcaactgcgataacaacagaacgggtgtattcattcgcatagtttttcattacgtgtacgaacgatttgacacccttgctaccagtcaaccattcaagccgtcgtttagctacctccgcaaaacgcagaacctctggacgaacccattgcggataatgtaagacattattgttttccagtttacgaatagaatcagtctcttcatcgagatcaccaaatacataggacgataccaaacccatgatctggaaattaaccggtttatcagaggcgtctgtaatcacctggtacacaccagtagtattagacaagaagccacggtcagagaactcatctactacatcacgatacgcacgttgaatacgttgttcgatccacccacatttttcaatgtaaacgtcacgcaacaaagacttaacatgggcaacgtacgattcctcattgaaagaagaattcaatccacgtacgttcaagtaagaacgatctcgtccttcgaacgtgacagttggtttactccaaccactgtggctttccacctgtacacggatgttgtacgcatccaaggcgccattacctgtaatatcgaaccagatggtgtctagatggtttttggtgagccctaattcttttgcgttaaaactaaaatcaatattgctcatcgtaactcctatttagtgattgaatatcattttagtaatatagggtttaaaatgctttaaatgtaagacaacataaagcctcccagaagggaggcgtttatattactcgcgttcaacccatggacgaagatccattactgtgggagcagccttcttaatgtaagttaagatagaggctttgtcaactgtaggttctaaagcgataccgattacgatactatctttattacggatcagtagacgtggtttattgctctccagacgttgttcttcgaagagaatcttacttggatagggtaagtcatagggaagttgaaaaagcttatgtaggaccattggaacgatttctagaggggtacctagttcggcttttatttcttccaaggtaacttcaaattgtgttgccatgttaaatccttagattgtgtaatattcgtgataacggcgaagtttgtcatcatccaacgcgatctcttgataactgatcgtaatcttcatgtggttccatggagatcggaatgcgcgtccagttaacgatacttcacggtaatcatttacgtgttcgtctttcacttcttcctcgaacacgaccccgagtttactaaaacgtttaatcagtagttcaatagatctaccaagctcaccggggacatccggaaattctgttgctgatgcaattctaggcatgatcacaggaccatcttcaacttcataatctaccttgaatacaacaacacccaaatctttttggattggtcggaaaatacgatatccatccttggtcctccgaagcttatatccatcatccggatgtgcttcttgtagggcctctaaatgatcctctagtgcgcgaacgataccacggttataccgtagctctctttcacgataatcacgttcaaacgcttcctgcgggccttcttttgtaaattcttttacaacggtgtattcaatcgtttcaccagtcagatgatcggtgataacgaataagtacgtcatggcatcaaccaaagaatgttgaacgctataccgggtcatatcacatggaatggctccagctcgttcttctttgagataatcaaacatgtctttgagatgggcccaaacatcacaatcgctacctagtccatccaggtcaatcgatgtatccgggatttctctctgagcacaacaactcatacgcacctcttcaattatatttggcgttcacatgataaaagaaaaaggcgacatatagcctctcccgaaggagaggccaatgccaggttaagatttcacctgttcatccagggaagcaagaaacttctcccaagcggggcgaaccccatggaggtagtagctatactgagtagtctttttcagggactctacggtacattcctccggatcccattgattatcgccaccactgcccggactgagtccatagcagctgcaatgtgaaccgtggacctcgtagtatttaccatcgcgctcaaagagcacgaaagcgctacccgagtaatcctcgtattcataccacgcaaaaagaatggtagcattatcaagttcaccattagtcagaccgaactcagaaattacatcttgctcattttcaaaattaccgaagtacatgatttcacctttatgttgtctttgcggaatgcaaaaaaacgtttgcaacgttcatgcaaaatagacaacagggaaatctaacctgtattaaatactagatctcagtatttattcgtcatcaaactcaatgactaaaccaattttcttataaagcgctatagctgcttcattctttttgtgtacaaaaactttcttggcttgaatgtatcgtactagctgttcaccataccccataccttgggctgactctgctatatacagacagtccaaatgcatctccggtgtatagagaatagcataaccacgcaaatcaccatcaaaccaaataccataggctttcctagtgcaagcgaaagctttactggttaacaacgttcgtatattaccctcgtaatcgagaagagattcaagatagtcagggaggacaacatgtgtcctctcgacctttatgaactcaccaattacttcatgtcgaatttcaccaatctctaacatgaactatccaaacactttaacgaatgcttctggccagagcatggttttgaaatcaaccccattaagttcaatgacaagaagacctttatccagcttcagacggatgatatcagtctcgtccatctcacgttcagctacatttgacatgtaagcaaacacagcctcgttcggaatcatgtatgtctcatccacatatgcctttacaacgaacagaacgttctggcattggatgtaatgagtttcagagagttcatcataactgaatcgagctcgaacagcagtcttctggtgaaggctatttgcggtgatctcgatatccgtgatgacagccatcgctttagacaatgcaaaggtagacatgctaccagagcctaaccaaaggcgatgaatttccgtgggagttagatcaaccgcggacatgggaatttcgatagtcgaactatcgtaaacttcaatgcagtcactggcatactcaccattaatcaagaaacggaatacattcccatcttgctcatacttccagcgggaaccaacattgcgcatcattccatccagatacagtgcgacaacgtcagacttacttggggatttgaaagttacatcttcattacgcagggttggttgagacatgataactccttagaaatcaatggtgatggttatttcgtctttgttatcgtcaaaggcacggagactaatgacagtctcgtaatgtcgtatggacttagaaacagataccagtttagtggcaccgagggcatggagagtatccatgatttctttggtattaacactaggagactgatttccgtaactaactatcagttgttcaatacgctcctgagtaagaggttcaacgaatgccgtttgctggtcgattgcagggtaatgaccaaaatgacaaattgtgtacttacgtttaagaatgccaccaacctgactaacgacatccacacgccgatgcgaataactgtagttttcaagaacatacagattgtcaggatacaggggagccaacttatcaacgaaaccatttgcggcttcaccaatggtggaatcgagttgtaccattacatcgtcaccggtataatctatccgcacacgagcgtaaggcttcgcatcaatacagcggtctgcttgttgctcggagtgtaggtaattcagagcgtagcctttaccagttagttcacccgatactttagccagcagtgtcagtagttcactaccagctggactcttttcggcatactcgccataaagcattgacagctctttactcacagatactttcgtgaaatcgacatcacgtagaacaatggtgtcactgtaattacggtaagggtcgtggtaaccaccctcttcaccaaagccatagaaaccaccaccgtatttacgtacgattccaatagtgccaatcatcttacgggtattgagatcgaagatgtactggctcagcttcgggcattgattcacagaaacttgggattgttcataaccagcgttataccaatcgctgactagtagattaccatgaacaccaggttcgatcagatcaagaccaacatatttagctgaccagttttcccaggtgaatttgggttcttcgtgttttacagcttcttcttttacaacaacattggacatattgcaaaacctctttttaacggaatgtttagcttgcatgtaatatagatctaagatattttttagcgcaatgatctgattaatcaaagaggtataaccatggctctcactattcgtcaagttcttgacaagcatttcgaagatgtcaagtttgaccgagacctttgcaaacgaatcatcgactacaccgtccgttacatgaaccgtaatgaagatcactctgcattttttggtggagttcttctaggtgttcaagaagttcgcttctatgatactgaccgtgagatttggtttgatgacgtgctacgtgtagatgacgatctactccgtcacgatttcgttaaagctgaaggtatcgatcctacacacattgtggcatctgatccattcaaccatattccaggttatcttacgatccaactgaataaacgtaatgacattccgttgaatatcaaacaagaagcaattacatgcgctttcatggtgctacattttaaatatctaacatctctattggttagacgatttaaatatccggctaggcgtgaagtggccgaagcgacatttgctgcccttaactacaagtttgatattaaagctattggtagctggggaaaattaattcgtgaacgttccgaggggatttcttcgaacgacacttcgaatatttattactcgtatcttcatgataagatcgaggataaagacggctatatgtcgaaacgtgttgtaactgacacgcagtcacgtatccgtgaattgatcaataaatactacgaagtttatatccgtactttacaatctggttctagattggttatgacctctgacattggtgtcaatactgatggagatcaaatactaagagataaagttaacggttattcgggttatcttcgctacatgcatggtgttgttaacaacgaacagaactttattagacctgagctattgggtgtgattgagaactcaatggcagctatgcctccaaagcttctagtggaatcgctacagtacatgtcgcgaaattatggtcaaccgagaatgggtcatctagagaaactagtcgatgaatgtctgctctacgcgtttgactacatgcagtcgattaaaacctctgtacagcgtaataccgacctaaacggtattatcgtgaagatccgtgctaagctgatggcttcgcgttcagaagatccacgtgtactctttatgcgggacaccggtgaagcaatggtgaaagaagcaacgaagattaagaacccagctgttattgcagctacccgtactgggatcatgctttacattattcttcgagctatgaccaggaattattattccaggtaaagaaaaaaaaacataaatgccctctcccgaaggagagggcttatgtcgtgttacttgaataagtggtctgccaggattacaacgaacaaagcgagtaatgtatttctcccgcctttgaatacgcgtatccaccacttagatcgtttcaatgtaactgagtcacacccagctagcttttcatgttcatattgctttgtcgaatagagatatccgatatttaaaatcattgcaataaagaacagactagccaaaccgaaagcgatcattagttattgtaatcaactacagatgcgagaagatcagcggcagtccgatcatcagcattccatagtttatcacaccactccttatcttccggattggtgattttgtgaagttccatgtgactatggaaagcttgaccccaacgtagattcttgtcgaggttcttaaaggaagccagtcgggtgtagggaattgttatggccataactcaccgtatgcatttaagggtacgtttagtctgttcactcagaggaccagtgcagtcaccagtcttcagtgctaccagggtttgataaaactcagttaacagtggtcgatatttgtcgatttcatgttcactgtatttgcctttaggaaaagcgattgtgtaaccatcaggtggcggcatgtcaaattcggtgaacaagtcaccattatcgacataattacagatacctttgttacagtagatcagatcagaactatctaccatttcagcgtagagttgggcatcgtattccaccggattgaacggatcagcgacagcgacttgtaatgcaatagtggataccacagcgatgaacagtttacgcatttcgatgttccttataaagcagttttgaaatggttggttacagcgttgatcaacatctcttcgatatcgaccttacggtattctggttctgagttctcgtcttctaccatatcccagtagatagtggcacgcagcagcgctggtgcaatgaaacgaatgatcttgccagtagcatcgaactccacgctgaacatggcatactgttcagaggtaccagctttgtagaagatgaacgatccggcgaaggtacgaatctccagttcaccgaaggtactgatacggacttgtttatcgaagtactcacctttggtgcgcatattgtcttcgataacagtgaacagttctttgagaagttctttattgaggtgcatttgtagatccctattgtggtattgaattcacatttgtaatataggtttttaatatatttaaatacaagccgacataaagcccagccgaagctgggccatatatcaagcgtactgtgcgtttgcttctacgggtaaaccacgagcgatgttatctgcatcggtagctacagaagcagctactcgattaatacgatgccaaagaccattatcctcagcagcgacatcagcagagatcaaatcgttgtacctttcaacggaacccccttgagcgggagtttgcgtcgaagcatcatctagcttaaggggattagccattagtcagcaccatcgtaggttacacggttagtagcggatttctccagctgatcacgcagaccaatgttggcagcacgtacgtcagcagagatggattcaatccaaccacgttgttcgttcgggttcatccctttaatgttcagtgtacggaacagttgacgagcatacatggtaacaccttcagatacgtcagtcatcgccgagaactcaatactgaggtcaaggttctggccgatctgagcggcgtctttacggctctcccattgaccagtcgacagcgggaacatgttggtgcagagatatgcgctaacaacgtcttggaaagtcgggtctggttcaacgaatagaatcgtggcaccgtagaaggtagcatcgtatttctccggcggaacgttaccttctgcaacgatacgcgggatcttggtattctcgtcaccgataccgtaggtgatccaccacttcaggtaacgctggatagcacgaccttgcagttcccagcaacccaacgacggagtcgaacgagcacgggtaacgttggtggcagcctggatggcttcaccagaaccaccccaaggagcttctgcggtatcaacagttacagtctgctgtagaccatcgatagtacgaacatggttctctaccagggctttaagcgaacgaactagttgccggctattgctagcgtattggaagaagcgtggagcttccagaaggaacgggacgaggttccggctaacgtaaggagtgttactcgcaaggttagccagatcaggacgaaagacatccgtaccagcctgagccaggttgatggtgttcttggaaccacctgcaccgtagccggactgaggagccatcgggtcattataacgtttcatttcgattcctcaaaaatgagtagttaccgagcttattgctgctcggtaacgttctcgcggcgaacggtttccagttggaagttcagagtggtgcgcgggttattagccgcaacagtcacagtgcaagtccagctggtgccattgttctcatcaataccggtgatctcggtacgcgggatcacgtctacacgaccaccaaacagatcacgagtacgatcaaggatctcttggtcgcaacgttcaacaagctgttctttagtcaggaaagcgttacccgagaacttagcatggatcttgtggatcaaccgcatgattacgcagcagatattcacagtgatcgggctaagcagtaccgatgtgtcgtccagatataccgaacgcagacacgggtagtaattcgaacgatggtcgtacgaagtagagtaagttgcaccattggcccagaggttagccgatgtacgagcattgaagaacggtacgttaagcttcttaaccatggttacacggttattcggatcaacgtccatttcagcgcctgcacgtaggataccggtgccagcaccagcataacgcgaccacatcatggcaacgtcgagcaactgcggaacaaacttattgtaaccgccgccaacaagcttaccagattgcattacaatcatcgcacggcacacaggggtaccatacagggtagcttccgggaaagccttcagacgagtcatcagagcctgtacacgggatacttcttcagatgccgtcggaagacgggtctcaccttcaacaaaggtagtgaagaagtactgtacgtcacgacgagcagacaatacttgcattgccttatatttcgaggccatcggcagaccggtgtcgtacaggataccgaattgatagagcgcaacgttttcgtactgatcaccaagcttaccaaagttggtattctcgatgtcaacaagcttgacgtattcatccagggtagtggtaccgtctttaccgccttgggcgtagacagtagcgttcttacctagaagcacaccaccttcaatcggaccttccagtttgatggattgatacgggtcaccatcttcaccaagcatagtgaggaagtcaatctgaccaggtgcatcgatatgtgcattgattgccgggtttacacgggtctctgcatcgtagataatctcgcgaacgagttctacgttgtcacgatatacatagcactgcgagaacgggctataaagcggggacatacccgactcaataccgtcgtcgttatactgatcgataagaacttcatcgatggttagatcacgatcatactgttccgaccaaacaccttcgtcgaacgatacgttgacgtagtcttcatcggtcttggtcttgatgatgatcggagtgcttgtcccgtccatgagttcaacgaattgaacacgatacagacgagtcttgaagcgctggccggtgaattcatcgtagccatccggatcgagctgagtcggtgcccagatacgcatgcccaggttattaccgggctgaccaaagaacgaagcgggtagttcgaacagcggatatacagtggactgactaccgtccataccggagaccatggtacccggcaggcgccgttgagtacccacttcggattggttatcagcaatcagaacgatgcgtgcacgataaccttcaacagtatcggtaccagaagcaatcggaccgttaccagtgtcagttacagcatcaggatagttaaagccactgagacgggtcacagaagcaggaatcatgtcttggaccatttccagggccacagtgattcgagcagggttaccagcgtcttcgggtttcaggcgtttaacatagaaaccgttaccttgaccaagcaggttcagcgccagcagcgattgctggttaaaatacttgctgcgtggatcaagagagctttgaccaaagatagacgcgaagccatcttcggaatcacctacataagtggtttcagttgggccagtctcagtgaagagacgaagcagaggagtgtgttgggcgaaagtaatctcgggacgaatgaacgcccgacggctacgatctcgaatcccgttaaacacaaccttaggaacagcgttgtagtacgtggacatctttatgtttctcccagatgtggagctttaaactcgatgttatgagtgttaactaacagtcaatcataaatattgttcatagttggctgtgatagttatttttccctacccatgaaaggagtaaaacggtaatgttttcgctaccgtatcaaacaacagtctgtgggatctatcctaaatatcaacaggtgatcgcagcagcccgtcgggcagaaattgatttgccattccccctggtagaaacacccggtggaaatcagttaatgaactctgcgttcgtaacacctcgtgaagaacacgaagcaattccgaacttcactcagattatcaatgtgggcgaacccaataaaccacggcttcttattgatagccgccaatacatgaagtttgacgctcgatctcagaagtattctttgatcgctcaaaacgactggcagttccaatgcgttcgtctagctttgaacaatcgcctgctttctggcgacgaagctttctttaatcgcttatcggacctacctgcaaaagtattccatcgttgggttagcggtgtattggttacacgctacaatctaccgatcgaatcgcagatggcactctttgtcattacggcttattactattacgccatgtccacccctgaacttcgtcaaccgggtgaagagcgtgagaaatttgcaccgattatttctcgctgcacttcggtgccgccagaatttgtactcgatgttgccgcaacgatgggtaagctggagaatgcctctgacctcattcatgagatgtcagttaactcccgtcaacagcgtaccggtgaattgaagtttggggatctttttgcattgatctcgacttcttggttcggtgtaaactcccgtgaaaacgtgggtgtagccctcgaacatttaccgactttcattgcattgctttacatggcaattgcagaacgctcataccgtaaaacagtaattactcaacgagtagaatcgttagctcgtggaaacgagcttaaagtctttactgacctcgttttcaaagcggtttccgagcaattcacacgtctgcatcagtaatgggtgattaatgaacgactatctattgcgctacgcaattgagaacgtttggtgtaaccctactcaggatcgacagttcgtatataagctccgtcaattaactccccgctacggtgtacggggtagttacgtggtggagcacgaacgttataaacttccacaaatctctactcgtgacttctggcatatctaccaaatcggtcaggttattcctcgccatcttggtattccaaagctgttgaataactggatcagccttgagcaactgggtaaagaggtacatactctcgcggaagtttatgtcagtaatggaattcagttcccacgttctgaaacatatatcctggtaacccaaacgcaaaacttgcttgtagctattcgacgaaatgatcgcttccctgatttggacgaagccgagaataatccatatctccatgtttatcacaacgcgtatttcaactctgatcgtagcgatatagcagcagcccgttatatcgatgtgatgactttgacacctaactctaacgaagagcttcgtcaattccaaattcaaattatggacttgattgaaactaaaggcggttacccccagtacttcgttaacggtaggttcgtacaagagatatcgttagtaacagctggtccgggtgattactgtgaattcatccttgatccaagtattaaacgtgtagtcgatttagatctacgtgatcttaaaacattcaattctacgctcgataaagaaaggaaatatatccttcactacgacgataagaatgtcaacacgattgagtacttcgacgatctagatgtttatctttgcaaaaggggttcattgcctggtcggttcagtggtgtgatgtatcaccacaatgaaggtaattggcttcgaatgttgacgcataaagactattcggctcctgttgatcgaattcagtctttcatcacaagtcaccctgaagacccacgccatgcaaatgatccatcgcgctggccttctgacaaatggacaggtattgaagataagttccttcgcctttacattcgtcattctggatacgaacgacctctggtagccgatgttggtcgcattcaagaactctatcgtttatcctcggataatatccttagggccatgactggagcagacgctacttgcccattatggagagcagagaatcttgaacaatcggcttacgttcaattcatgtccgctgatccagatgtaatctaccctatcgctttccaagatcctgatgagatatctcagggtaagatcgatgcccagaattttgccggtgatgtattcggttaccataaagccgcagatattcaggcacataatccaaccaaggtccatgttgaccaaggtacagtatatgcaagtcttccatacaactattgggagaatgctactgttttcgaatatgattcgaaagggattttgttgggttattaccatcatgtcgcagggcgccgataccgcgtggtaaatcaaaccgaatgtaagatggtagaatgtattactggtaaaggtgataccaatcttcatggtatatttggtaatggaacagtcgatctttcggaaggttataacttccgtctttacgtctgtaaagtctgggctggtgtaccaaccaacgaatggattgatatcactgacctacctaatcgaaatgattggggtttccatgatacaactgatattgaacatcctaaatggacatggactgctttaccaaatgaatggtacggttatgtccgtatggataactacttctacctgaaggaaatgcggtttactaaagaccagggtattattcgatttggaatcgataactgggaagagcataacggtgaactaatcaacaagctcatggagatcccattcggacaactagatatcttcttaaataatcgaccgatcataaatggtctcgattactttgataaaggtattatgactgtactgaataaccatgagtatttggttgatggtattaataccgttcttgtacgaggtaccggttactgtactcctgatcttcagcgttataaacctggtgaagttggttgggtagaatataatgttctttccaataatggtatttacgatatccatacgcacaaaatgcaaaggatcattgtagatggacattaccgcgcccgtgaagatttggtgtttgaggaggataataattctcttctgattaccgatgaacgaaatggagcacccttccaaatccaaacaccgcaatccactttccgtgatgtttacgatactgatcagcaagcacgtatcgcagatgacgaacgtgataaacaagtttccgattacatgacagcgtatttccctaagagaacacgcgatcaagttgactcggttacacgtcgttatgtggtatattcggcattctctaacaaagttctccatgacattgttaagggtacgctgaagccaccgctggttaatggtcgttacaacgagatggatattgctcgggttatggcatcctacgagtggttggttccgtttgatatcctaaacacagattacaacaccaaccatgtggtagtttatccacattggcatagtgatcctattgggttagatactgatcagtatgacttctacattcgtgtactgaagttgtatttacagcgccctatggacatcgcgccattcgtatacctaacgaggacttaacatgcttcctgtaccatacgggaattccgactacatggaccctaataggggttggtgggtttggaaccgcaaagatatcgtccagcaagctggacaagtaaataagtgggtccccaatattggggacctcgtttgggaccgcgagaatggctggttcacagttgaggatgtcgaagagggtactcacgtagctactcttaaagaatggtatcctccaaccaaagttgaccccgacggcgaagaaaacgtactggtgggcgtaggtccaggctatagctccgaaagctaccgtctgttccttgataccagcgttattccacatactctcgcacccgataaacgtctgcatttttatggctcgatggttgctagttacaaagtctttaagggtagtgatatctctgaagaatttggtaagatcatctctgctttcttcaccccctctggtgattacacgggtccacttattccagttgagacagtaaccgtcggtaatggctctcagaacgtcattaaggcccctatggttggttttacagccgaggagatggatgacggtgagcgttgcaccttggtggcctacgatgaccttggcggggttgtgtcgatagcacagttgctcgtacaaaacacgaaagcaattcgacagtctgataattcgaagaagtacattgccggtatcgagatcgagagtccattcctgtctgctgccgatcctaaggttattgaattcccgctgaacgtaaacgttgaatctcttccgatggttggtatgattaactatcgtggtggttctaaagtacgtcgcggtatcgataactcgacaatgttcttgtttggcatggaaaactatatcgctactgagattggacaggagttcccgcttactcttgcttaccagttagcagaagatgaaatttcctatgcgttgacaccaacagcaaatcgtcggattacagaaaactacattgcccgtacaactgctgccgatggagcttacgaatgccgtctattcgtttatccagtatggcaaaacgttactgctggctaccgtctggaattctggctttacaacttggatcgccaacgtttctacaacgttacttctttggttgaacttggtgttaactcagcaccattcaatccgaagggttatggtaatctacaaacgcttacctacgctgttaacctgaacaaggtcgatggtcgtttcgcaccacatcgattcgttactacattccaagttgcactcctgacatctggtgaaaaccgtgatgctaactgggaaatctacactcgtcctgatgtagacgcagcttatggacgtggtctgaaagccgatctggaatacatccaaaccaacgcttgggatctacgtctccagaacggagctaataccaaagaagcatggttgcggaagatgtatgaagcagccgagcctcttgtaaatccggactctgagattgtggctcctacaccgactcactttgtattgcatttcttgcataacaaatacgagttcagtgttgaacaatggaaagataagttgcgtgttaataacgatcttgccgatggagagcttctctacatccaatggattcgtcgtgaatacgacactgatcttcaattggcgatgaccggtattccagtactgaaacgcgcttaaggcatagtgccgtctcattagagacggctttatgtcgttttagtatgtaacaaataggagctggaccatgattgaaattttactatcggtcaactctaaaagagctaaaccaagtgttttacctactgaactgatagccggtgattcgacactaggttattttggtacagttacagctgccgatttcattggcgctgaacaaatgaacgatgtacacggtttttctggtaatccgtatggaacgcgaatgccagatcaaacagatgtaaattggttaatgttctctttaaatgacagacgactcttagtctctacaaagactatccgtcattcaatgtcctttgatcaattagttttggccattaataacttcaatactaattcatctaaagtaaaagatattgattgtaagatatcttatctgtcaggcggtgcaagtggttccccagccaactcggagtggggtcagctgatgtaccgtgtatccgcgaatgatccaactggaacattctgggaaaatttaagtaatgaggatcttggatttgtacatccaagtaacctcggtatttggacatggacacccactaatggtaacactgggtctcctaggttcaaagtcttacgtggtggacctaatggcgtaacagggtgggggcagaatgcaccatctcaacctaacataggttatggttggcgcccagtactagagttaatctagatacagaagctttcccttcgggggaagctttatgtcgtaaattaaccctaaaggtatgaaccttttgtttctttaaggaaacggtcatggaacttattttattccgcgatgattgggagaagttcccaacagcaatagcggatacaaaaacgtcaaataaaacattcttaaaattagcagctctttatagagatgagcttaaaatagcaaactggaaattcattttagcattactccagcctgatcttcagggagtagatccctatgatccagatctagacgatgctacaaaaatgaagattgccttggagtgtaaatacaatccttggtattacttccgtgaagttgcccgtgtcccagcgacatctggtaacgtcccaaaccctttccgcgctaaccgtggtaacattgcacttttctggtgcttctttaaccacttagactttggtctgttacaaccacgacagactggtaaatcggtttcaactgacatcttgatgacgggtatgatgtatatctggggtgagaacaccacgatcaacctgatcactaaagataataaacttcgaacagcgaacattgaacgtctaaaggtaatgcgagatctattacctgattacattcactgggctaatccaaatgacgtggacaataacgagctgatgacgtgtattcgtttaggtaaccgttataagaccgcagttggtcgtaacgataagattgctgccgacaaacttggtcgtggtcttacagtacctatcatgcagttcgacgaatttgcgtatattaacttgattgagatctctcttcctgtagccctggcctctggttcagccgcccgtgccgaagccaagcgtcaaggtcaaccatacggaaacatctttacaacaactgctggcaacattaccactcgcgatggagcatttgcttacaagttcatgacaggtggacatacctggtctgaaacaatgttcgatctagtgaaccaacgtatggcagtgttggtaatggagaaaggatccaaggctgatcagaaacctatcatctacggagcttttaaccataggcagttaggtcgtacagatgaatggttattccaggaacttaaagagtctagttcttttggcgagatcgctgaccgagacttcttcaatatctggactgttggtggtgaaggttctccattatcacccgaacataagaagcagctaaaatcatctgaacgtgaaccaatttggaccgagatcacgccagacggttacaccattcgctggtatatccctaaacatgaagttgaccagagaatggctgaaggtcgctttatgatgggcatggacccaagtgaacttttaggatcgggtaatgacgccactggtatggttatattcgatgtggagacacacgaagtagtagcagctggttgttataatgaaacctctgttcctgttattgctgcattcgtcggtaatctattaattcgttatccgacgattacatgggtacctgaacgtaaatcgatgggcactgctctcattgacttcgttgtaatgcaactgcataaagctgggatagatccgttccgccgaatctttaatagaatcgtagatgaacacacggtactagaatctgagttccgtgatattcagactccgttgtctcaacgacctgcttcgttctatgatcgattcaaacgttactttggtttcaacacctcaggttccggtcggtattctcgtaacagcctgttccttgaagcattaccgagttcaatggattacggtagccggagaatggcggataagacgctgattacagaactacttgctttgacaattaagaatgggcgaattgaccacactcgtgataatcacgacgacatggtaatttccatgttgttggcgcactgggtatgtattcgtggacagaacctttcttattacggtattaatccagcaacaattttctcccgtgctgttactcgtgacgtagagttaactgctctggaaaaatatcgtgaagataaagagaagcaaaacaaaggtgagttcgaggacttgattgctcagctaaaaggtgagacaaatccattcgtaattaccaagcttgagatgcgtcttcgtaatctttcaaagagtattaacatggaagaaacaaccggtgttggtatcgatgccatgttgaaacaagtacgtgatgatcgtgttagacgtgtccgtacttctcgtttccaacaagaacgtagtttcaattcacttggattctatggacggtaagtgacaacataaaagccttcccgttggggaaggctttatgccgttaagctctttgacctaaagaacattgttgttcaagtcgacgtttctctttcttaacattcggtttagagggacgtgtaacaattcggtaactatccacacctgcacgaatcaaaccacggataattggattaaccttagatacttttagcgcctcatagaagatatggtctatctcttttcgagttaccttaacttctgtctctttcccatctaccatctggaagatagtgtatgtctcacaaagcttatcatgcaacgctgctgcctgaccatgcttacctaatcgagggatcaaccaacgtactggccgtggaatagatgcaccatctgttaggaaacatttattaacaactgcgtatttaccagaaccttcacttccaatgtcatattgaaaggtctccataatccgccagtagtcatcacccagaataacagatgcatcatcgtcatactggatagacatcttggcattaaacttagtatagctactcatttacaatctccgttaaccacagaggattgggttaacgtcttgcccagtattgcaaactatatccaagacctggattacggggagcgttagttacacctttctgacaggaaatgaatcgccatttgatcggatcaatgtattcttcaaacttagcaatttcagttacgtcgtcggaagaacaatcaatgtccatatccacaaccgtgcgatagaactcactgcaacgagagagaccatctttaaatagtcgttctccaccaatgataaaaactttcttttcattttgagataattccaatgcttcatctagagatttaacatggatatacccatcacctttcaaattgccattagaagatagaacgtagttagtacgacctggaagaggtttattaccaagagactcccaggtctttcgtcccattataaccgcatgtcccaaagtcttctctttgaaccatttaaaatcttcagggatatgccatgggatatttccattgattccaataatgccattggtagacacagcaaaaatcattgctaaagtgggcatgactaactcacttactctgcgaacttaacattgaaagagaagggtgtccaatggaacgtatattccacatcaaaggtaccacggaaaacagcacactcctcgtgtagattagcgatgcaatgactcaaagcaatctgttgtagaatactgaattgattaagagagaactcaaactcttttttactaatcgtggaagacggatcaaagtcaggatgtccatcaactgtcgatttatgtgccagcgtaccacggaaaatagctttattaccagtgggaaggacatcgataaaatattcggtaattacaaatcctttctctccaacttccttaagatcctctagcagatattgcgtgataaggaatagttgtggcgggagttcgagtgaagggtgcttaccagtgatggtatcaatgaggctagtgatttgactgaaatgaagtgaatgaacaacaccgtcattatcaagaatagagagttcatgcgaaatcatcgtttcgctctcaccctcggcttgatgttcaaaaataagaccttttgtgatcttatcaaatttatccatggtatctacaaacgggtaattaacagcggtcatttcttaactccattggtaacaactttttcaaagatcgcttcaaattcttttttatgatgaagcctgtaactcagaatacgtttcttgtcatcccgaataaactcaatatagtcacctggacaaacaacagcgggactatcgtcagttcgaactttaaggatcccatgaagggccatcttacagttacagtcaggacagatcattccaccttgtacactaccatggctaatatgccgtccaacgatagccccttcgttaattccattaacggtgcggtccatgggatggtcgccatttttaaaccattggtgagcttctacgagtggtagaatagcttgataataaggcatttgtattctccagattgaaataaatagcatatccttttccatctgagtagttcttctttttaggtgttgtatggtatgctgttagaagattttaacttatttaaaactaaatgatcgtaaaaatacttgcgtggttttagttatgttagaattcatcaacttacgttttacgcaataaacaactggaaaaatagagatgattgaaactattatcaaactggatggcactgaacaacccttcgataacgagaaagcaaatggctggggcgagtgggcagcggcacgtctgggcaacaaagttgactggggtagtatcgtactaggtgctgtaagcggtaagcccaaaaaggttacatctcaggagttccagggttggctgatcgaagaatgtcttaatcgtaagacctggtcgtattacctaatggctggtcgtctgtacgcagtatttctgcgtaagaaaatctatggactggacggtattccgacagtaaaacaacttcatgccaaaatgcatgaagatggagtaatgatcaaactggattatagcgatgatgaatatcaggctatccaggagatgattgatcatgatcttgatttcaattcccctcatttcgctctccaccatatccgtggtaagtattcccttcgtaatcgcgtgtctgggaaagagtatgaaactcagcagtttacatacatgcggatggcaatggctctttctgagaaagaacctaaagctgagcggctggaacatgtgaagaactattatgaattgttctctcaaaaacaattgtcggcgccgactcctaactacgttaaccttggtactgtactgcggggctttgcttcttgctgcctcttcgcttctggcgacaacggtacttcgttggctatcggagactacatcgcgaacatcatgacccagtcctctgctggtattggcgttaacatcatgtctcgttctgttggagatcctgtacgtaacggtctcattgttcaccaaggtaagaaaccttacatcgacgtaatgggtaaggctgttcgagctaacctgcaaaatggtcgtggtggcgccgtaactagcttctacagtctctttgatccagaagctgatatgatttcccaactccgtaaccctcgctctaccgaagaccgtaagaatcgtgatcttcactatgcagcaatgggtaacgttcttttcgcagctaaagcagctaagaatgaaaaggtgttcgtatttaacccgtatactgctcctgacctgttcgaagccttctacggtaaagaccaagctaagttcaaagagctctatgaaaagtatgaagctgatccgaactttgctaagacctacatcgatgcacgggatcttctaaaaacggttcttaacgaagcctatgaaaccggtgttgcgtatactgctcaaatcgatgaaatgaatcgccataccccgttcaaagaaccgattcatagttcgaacctctgtatggaaattgctgaaccgacaaaaccttactatgacatgcgtgacctctattctgaggaagaccatggtcgaggtgagattgctacctgttcgctggcggctattgttgttgacaatatcccagatgcagcaacttatcgtaaagctgcttattatgcgctgaagatgattgactactgtattctcaatgcagaatacgccttccctcacctgggtttcactgctaagcagcgtatgagcgctggtgtcggtatcatgggtcttgctacccatatggcccgtgcaggtctagcatattcttccgaagctggtaagcgtgaaatgcactttgttgcagaacggcatatgtatcacctgatcgaggcttccctgcgtatctctaaagaacgtggtcttgctccatggatgcataagactctgtggcctgaaggttggctgcctcttgatacctacaagcgaaatgtagatgaaatcgtacctggtgggtttgagaacatttataactgggagaaactccgtaaggaaattattgctaacggtggtatcggtcactcggtgctcgttgcatatatgcctggtgaagcatcctctaaagcagtaggcggtgctaactcgatctatccggttcgtcgtcttgttattaacaagtcggacaataacaacctgattaactgggctgcaccgtttggtgatgataaagcgtacaagtatgaacttgcttacgatattccaactaaggatatgatcgaagcttacgctatcttccagaagtggactgaccaaggtatttctgctgacctgtatcgtcggattatcggcgacgagaagattagctctaacgaaatgcttcgcgactacttcttgcaggttaagcttggtatgaagactcgatactacatgaacaccgagacttccgctaatctgtcgcttgctgcattagaatccgcgtttgaaaataacgatggttccaaaggttgcgctggtggagcttgtactctgtaacgacatatcgccctctcctaaaggggagggctttatgataacaaacattaacatcactttaataattagaagaattactaacgttctatatcaagtgtaagtaatcttgatattaacaaggaaacgaaaatgactgacaagctccccaagaaaatttttaacgtagaaaagactgactatgacgtacccgaaattatccttggtcaagaacctggactcctagattctattcatacccacttccctgtaccatggtctctctacaaacgtctacgtaagcttgactgggacgaattggaattcgatttccaacaatgtcttatcgaatttgaaacatgtaataaatcgacttacgacatgatgatcaagacccttgcatggcaatgggaagctgactctgtagctagtcgagcgattgtgaatattcttggtccggtgatgaccgactctaggatctggacaggttacgttcgaatcaacgataacgaagacgttcatgctcttacttattccgagattgtgaggggttcgtttaagaatcctcgcgttatcctcgatgagatcctgcgtgttgaagaagcacaagaacgtatggttgctgttgcccgtgtaatgggtgaagcacatgacacgtctcatgcctatgcattgaagcaagtaccgaataaccaggagacttacaataagatcttcatgttcttcattgcactttatatgctggaacgtattcagttcatggcatcgtttgcagtgactttcgctatttgtaaaactggcctgttccaacagattggtgaagcggttaagaagatcgcccaggatgaattcgagatccatgcacaatatggccaagaagtaattaaggcactgttgaagaccgaacgtggtatgactgcgtatgagcagtgcaaacctcagatcatcgaactgttctgggaaatcatccgtactgaagttacctgggttaaatacctgttctctgaaggtcgtagccttgctggtgttaacgcacagaaacttttccagtgggtactgtttaacggtaatgctgctggtactttcctgaacatcattcctgataccctagagaaacattcggcagaatatctggagctgactggtgttcctctggaattcccggaagataaccctctgccattcatggttgaatatctcgatatctctgcaacccaagcctccccacaagaagccgagaaaggtgactacatggttaaccttcttgacacacgtggcgagaaagatgagtttgatgtggacttcctgtaatgaaaaagatcgctctcgctgtaactctgatgttccctcttactacgatcgcagcgggggagatcaagtcttctacaactggcatcgtaaagcaatctgaatgtcaactgattgctaaagataatagcatcgttggcgcgactgtcggcggcacagctggcgcagttggtggtgcaatgctcggtcgtgctatctttggtaaatctggtggttggatcggtggtctcgttggaggtgctgctggcggcgccgttggaaacgaaatgggtgccatagagacattccaatgcaagatgattatcgaatctgatggtaagcaacatctaatgcaaactatcgttaacaagaaaccagaggttggtaaaacgatcactgttcttgaaatggtagatggtacccgtgaagtcatgtaatcatactgccctccttcgggagggctttatgttatgtcaattctaaaggtaacaaccatgcctaacattaaccttttgctgcgatatgcgatatctctcgaagcggaaatggatgatctaatcaatcagttatttgatgaggtcaataacccgcgtgccgatcgcccttacgatgtatgggtcgagccagattctgataacggtatacagccacccaccataaccgagcttattaataatacggacgatatgtggacatattacaatcgttcaggtagatctaatgtaaagagctacaaatatggtcctgattggatgcttgttgaattcggtggagaagtgttttatctttatacactaaagagcatcactgagatacaactacaggacatgaaatactttgcagatggtggcgctggtctgaatagctatattagcaaggttattcgtggcgggtatgtagctaaaaacattaataatgaaattattctaaccccaggctttgaaatgtataagtctgaaggacca
